(19) United States
(12) Patent Application Publication
(10) Pub. No.: US 2024/0191233 A1
(43) Pub. Date: Jun. 13, 2024

(54) COMPOUNDS AND METHODS FOR REDUCING NLRP3 EXPRESSION

(71) Applicant: IONIS PHARMACEUTICALS, INC., Carlsbad, CA (US)

(72) Inventors: Susan M. FREIER, Carlsbad, CA (US); Huynh-Hoa BUI, Carlsbad, CA (US)

(21) Appl. No.: 18/546,462

(22) PCT Filed: Feb. 17, 2022
(86) PCT No.: PCT/US2022/016822

§ 371 Date: Aug. 15, 2023

Related U.S. Application Data
(60) Provisional application No. 63/151,058, filed on Feb. 18, 2021.
(60) Provisional application No. 63/229,261, filed on Aug. 4, 2021.

(51) Int. Cl. C12N 15/113; A61P 1/16

(52) U.S. Cl. CPC C12N 15/113; A61P 1/16; C12N 2310/11; C12N 2310/315; C12N 2310/321; C12N 2310/3341

(57) ABSTRACT

Provided are compounds, methods, and pharmaceutical compositions for reducing the amount or activity of NLRP3 RNA in a cell or subject, and in certain instances reducing the amount of NLRP3 protein in a cell or subject. These compounds, methods, and pharmaceutical compositions are useful to ameliorate at least one symptom of a kidney injury or kidney disease, including acute kidney injury and chronic kidney disease. The compounds, methods, and pharmaceutical compositions are further useful in the treatment of a cardiac disorder or cardiac injury.

### FIELD

[0001] Provided herein are compounds, methods, and pharmaceutical compositions for reducing an amount of NLRP3 RNA in a cell or a subject, and in certain instances reducing the amount of NLRP3 protein in a cell or a subject. In certain embodiments, compounds, methods, and pharmaceutical compositions are useful ameliorating at least one symptom of a kidney disease or kidney injury. Symptoms of kidney diseases and kidney injuries include, but are not limited to, nausea, vomiting, loss of appetite, reduced urine output, elevated serum creatinine levels, muscle cramping, swelling, itching, chest pain, shortness of breath and elevated blood pressure. The compounds, methods, and pharmaceutical compositions are further useful in the treatment of a cardiac disorder or cardiac injury.

### BACKGROUND

[0002] Kidney diseases and kidney injuries can prevent kidneys from functioning properly. The kidney's main function is to filter and eliminate waste and fluids from the body. Symptoms of kidney diseases and injuries include, but are not limited to, nausea, vomiting, loss of appetite, reduced urine output, elevated serum creatinine levels, muscle cramping, swelling, itching, chest pain, shortness of breath and elevated blood pressure. Acute kidney injury (AKI) is an abrupt loss in kidney function. Individuals with diabetes, cancer, cardiovascular disease and human immunodeficiency virus (HIV) acquired immune deficiency syndrome (AIDS), or who have recently undergone a surgical procedure, are at risk for AKI. An individual with an increase in serum creatinine of at least 26.4 μmol/L (0.3 mg/dL), a percentage increase in serum creatinine of more than 50% from baseline, or a reduction in urine output (<0.5 mL/kg hourly for >6 h) may be diagnosed with AKI. Chronic kidney disease (CKD), also referred to as chronic kidney failure, is a gradual loss of kidney function. Kidney diseases and injuries may be treated with fluid replacement and dialysis. However, if not treated sufficiently, they may result in heart failure and/or death.

[0003] Cardiac disorders and cardiac injuries can prevent the heart from functioning properly. If not treated sufficiently, cardiac disorders and cardiac injuries may be fatal. Heart disease is a widespread and costly morbidity throughout the world, and the leading cause of death for men and women in the United States.

[0004] NLR family pyrin domain containing 3 (NLRP3) is a subunit of the inflammasome, a component of the innate immune system that functions as a pathogen- and damage-associated molecular pattern (PAMPs and DAMPs) recognition receptor. Many activators of the inflammasome have been linked to the pathology of disease. Among these are reactive oxygen species (ROS), advanced glycation end products (AGE), ATP, particulate/crystalline substances (e.g. monosodium urate, cholesterol, asbestos, etc.) and bacterial and viral pathogens. Hepatic NLRP3 inflammasome activation, which promotes caspase-1-dependent IL-1β production, occurs in patients with NASH, and evidence from knockout mouse models suggests activation of the inflammasome is important in NAFLD progression. NLRP3 has been implicated in cardiac disorders and diminished cardiac function, and in liver disorders.

### SUMMARY

[0005] Provided herein are compounds, methods and pharmaceutical compositions for reducing the amount of NLRP3 RNA, and in certain embodiments reducing the amount or activity of NLRP3 protein in a cell or a subject. In certain embodiments, the subject has or is at risk of having acute kidney injury (AKI) or chronic kidney disease (CKD). In certain embodiments, compounds useful for reducing the amount of NLRP3 RNA and/or NLRP3 protein are oligomeric compounds. In certain embodiments, oligomeric compounds comprise modified oligonucleotides.

[0006] Also provided are herein are methods useful for ameliorating at least one symptom of a kidney disease, e.g, CKD or kidney injury, e.g., AKI. In certain embodiments, the at least one symptom is nausea, vomiting, loss of appetite, reduced urine output, elevated serum creatinine levels, muscle cramping, swelling, itching, chest pain, shortness of breath and elevated blood pressure, or a combination thereof.

[0007] Also provided herein are methods useful for treating a cardiac disorder or cardiac injury. The cardiac disorder or cardiac injury may be heart failure, hypokalemia, a cardiomyopathy, or a cardiac arrhythmia. Symptoms of cardiac disorders and cardiac injuries include, but are not limited to, pain, heart palpitations (e.g., irregular tempo, fast heartbeat, forceful heartbeat, or fluttering), chest pain, fatigue, shortness of breath, weakness, lightheadedness, dizziness, fainting episode(s), nausea, confusion, intolerance to exertion, and/or blood clots. In certain embodiments, the compounds, methods, and pharmaceutical compositions are useful in reducing a sign or a symptom of heart failure.

[0008] Also provided herein are methods useful for treating a liver disorder. The liver disorder may be non-alcoholic fatty liver disease (NAFLD) or non-alcoholic steatohepatitis (NASH). Symptoms of liver disorders include fatigue, ascites, pain in the upper right abdomen, bleeding and/or bruising easily, itchy skin, jaundice, loss of appetite, nausea, swelling in the legs, confusion, drowsiness, slurred speech, enlarged blood vessels, and red palms.

### DETAILED DESCRIPTION

[0009] It is to be understood that both the foregoing general description and the following detailed description are exemplary and explanatory only and are not restrictive. Herein, the use of the singular includes the plural unless specifically stated otherwise. As used herein, the use of “or” means “and/or” unless stated otherwise. Furthermore, the use of the term “including” as well as other forms, such as “includes” and “included”, is not limiting. Also, terms such as “element” or “component” encompass both elements and components comprising one unit and elements and components that comprise more than one subunit, unless specifically stated otherwise.

[0010] The section headings used herein are for organizational purposes only and are not to be construed as limiting the subject matter described. All documents, or portions of documents, cited in this application, including, but not limited to, patents, patent applications, articles, books, and treatises, are hereby expressly incorporated-by-reference for the portions of the document discussed herein, as well as in their entirety.

### Definitions

[0011] Unless specific definitions are provided, the nomenclature used in connection with, and the procedures and techniques of, analytical chemistry, synthetic organic chemistry, and medicinal and pharmaceutical chemistry described herein are those well-known and commonly used in the art. Where permitted, all patents, applications, published applications and other publications and other data referred to throughout in the disclosure are incorporated by reference herein in their entirety.

[0012] Unless otherwise indicated, the following terms have the following meanings:

### Definitions

[0013] As used herein, “2′-deoxynucleoside” means a nucleoside comprising a 2′-H(H) deoxyribosyl sugar moiety. In certain embodiments, a 2′-deoxynucleoside is a 2′-β-D-deoxynucleoside and comprises a 2′-β-D-deoxyribosyl sugar moiety, which has the β-D configuration as found in naturally occurring deoxyribonucleic acids (DNA). In certain embodiments, a 2′-deoxynucleoside or nucleoside comprising an unmodified 2′-deoxyribosyl sugar moiety may comprise a modified nucleobase or may comprise an RNA nucleobase (uracil).

[0014] As used herein, “2′-MOE” or “2′-MOE sugar moiety” means a 2′-OCH₂CH₂OCH₃ group in place of the 2′-OH group of a ribosyl sugar moiety. “MOE” means methoxyethyl.

[0015] As used herein, “2′-MOE nucleoside” means a nucleoside comprising a 2′-MOE sugar moiety.

[0016] As used herein, “2′-OMe” or “2′-O-methyl sugar moiety” means a 2′-OCH₃ group in place of the 2′-OH group of a ribosyl sugar moiety.

[0017] As used herein, “2′-OMe nucleoside” means a nucleoside comprising a 2′-OMe sugar moiety.

[0018] As used herein, “2′-substituted nucleoside” means a nucleoside comprising a 2′-substituted sugar moiety. As used herein, “2′-substituted” in reference to a sugar moiety means a sugar moiety comprising at least one 2′-substituent group other than H or OH.

[0019] As used herein, “5-methyl cytosine” means a cytosine modified with a methyl group attached to the 5 position. A 5-methyl cytosine is a modified nucleobase.

[0020] As used herein, “administering” means providing a pharmaceutical agent to a subject.

[0021] As used herein, “antisense activity” means any detectable and/or measurable change attributable to the hybridization of an antisense compound to its target nucleic acid. In certain embodiments, antisense activity is a decrease in the amount or expression of a target nucleic acid or protein encoded by such target nucleic acid compared to target nucleic acid levels or target protein levels in the absence of the antisense compound.

[0022] As used herein, “antisense compound” means an oligomeric compound capable of achieving at least one antisense activity.

[0023] As used herein, “ameliorate” in reference to a treatment means improvement in at least one symptom relative to the same symptom in the absence of the treatment. In certain embodiments, amelioration is the reduction in the severity or frequency of a symptom or the delayed onset or slowing of progression in the severity or frequency of a symptom.

[0024] As used herein, “bicyclic nucleoside” or “BNA” means a nucleoside comprising a bicyclic sugar moiety.

[0025] As used herein, “bicyclic sugar” or “bicyclic sugar moiety” means a modified sugar moiety comprising two rings, wherein the second ring is formed via a bridge connecting two of the atoms in the first ring thereby forming a bicyclic structure. In certain embodiments, the first ring of the bicyclic sugar moiety is a furanosyl moiety. In certain embodiments, the bicyclic sugar moiety does not comprise a furanosyl moiety.

[0026] As used herein, “cleavable moiety” means a bond or group of atoms that is cleaved under physiological conditions, for example, inside a cell or a subject.

[0027] As used herein, “complementary” in reference to an oligonucleotide means that at least 70% of the nucleobases of the oligonucleotide or one or more regions thereof and the nucleobases of another nucleic acid or one or more regions thereof are capable of hydrogen bonding with one another when the nucleobase sequence of the oligonucleotide and the other nucleic acid are aligned in opposing directions. As used herein, “complementary nucleobases” means nucleobases that are capable of forming hydrogen bonds with one another. Complementary nucleobase pairs include adenine (A) with thymine (T), adenine (A) with uracil (U), cytosine (C) with guanine (G), and 5-methyl cytosine (mC) with guanine (G). Complementary oligonucleotides and/or nucleic acids need not have nucleobase complementarity at each nucleoside. Rather, some mismatches are tolerated. As used herein, “fully complementary” or “100% complementary” in reference to an oligonucleotide, or portion thereof, means that oligonucleotide, or portion thereof, is complementary to another oligonucleotide or nucleic acid at each nucleobase of the oligonucleotide.

[0028] As used herein, “conjugate group” means a group of atoms that is directly or indirectly attached to an oligonucleotide. Conjugate groups include a conjugate moiety and a conjugate linker that attaches the conjugate moiety to the oligonucleotide.

[0029] As used herein, “conjugate linker” means a single bond or a group of atoms comprising at least one bond that connects a conjugate moiety to an oligonucleotide.

[0030] As used herein, “conjugate moiety” means a group of atoms that is attached to an oligonucleotide via a conjugate linker.

[0031] As used herein, “contiguous” in the context of an oligonucleotide refers to nucleosides, nucleobases, sugar moieties, or internucleoside linkages that are immediately adjacent to each other. For example, “contiguous nucleobases” means nucleobases that are immediately adjacent to each other in a sequence.

[0032] As used herein, “constrained ethyl” or “cEt” or “cEt modified sugar moiety” means a β-D ribosyl bicyclic sugar moiety wherein the second ring of the bicyclic sugar is formed via a bridge connecting the 4′-carbon and the 2′-carbon of the β-D ribosyl sugar moiety, wherein the bridge has the formula 4′-CH(CH₃)—O-2′, and wherein the methyl group of the bridge is in the S configuration.

[0033] As used herein, “cEt nucleoside” means a nucleoside comprising cEt modified sugar moiety.

[0034] As used herein, “chirally enriched population” means a plurality of molecules of identical molecular formula, wherein the number or percentage of molecules within the population that contain a particular stereochemical configuration at a particular chiral center is greater than the number or percentage of molecules expected to contain the same particular stereochemical configuration at the same particular chiral center within the population if the particular chiral center were stereorandom. Chirally enriched populations of molecules having multiple chiral centers within each molecule may contain one or more stereorandom chiral centers. In certain embodiments, the molecules are modified oligonucleotides. In certain embodiments, the molecules are compounds comprising modified oligonucleotides.

[0035] As used herein, “double-stranded” refers to a region of hybridized nucleic acid(s). In certain embodiments, such double-strand results from hybridization of an oligonucleotide (or portion thereof) to a target region of a transcript. In certain embodiments, a double-strand results from hybridization of two oligonucleotides (or portions thereof) to one another. In certain embodiments, the hybridized regions are portions (including the entirety) of two separate molecules (e.g., no covalent bond connects the two complementary strands together). In certain embodiments, the hybridized regions are portions of the same molecule that have hybridized (e.g., a hairpin structure).

[0036] As used herein, “duplex” means a structure formed by two separate nucleic acid molecules at least a portion of which are complementary and that are hybridized to one another, but are not covalently bonded to one another.

[0037] As used herein, “gapmer” means a modified oligonucleotide comprising an internal region (gap segment) having at least 6 contiguous linked 2′-deoxynucleosides, a 5′ external region (5′ wing segment) having 1 to 7 linked nucleosides wherein at least 2 of the nucleosides comprise a modified sugar moiety, and a 3′ external region (3′ wing segment) having 1 to 7 linked nucleosides wherein at least 2 of the nucleosides comprise a modified sugar moiety.

[0038] As used herein, “hotspot region” is a range of nucleobases on a target nucleic acid that is amenable to oligomeric compound-mediated reduction of the amount or activity of the target nucleic acid.

[0039] As used herein, “hybridization” means the pairing or annealing of complementary oligonucleotides and/or nucleic acids. While not limited to a particular mechanism, the most common mechanism of hybridization involves hydrogen bonding, which may be Watson-Crick, Hoogsteen or reversed Hoogsteen hydrogen bonding, between complementary nucleobases.

[0040] As used herein, “internucleoside linkage” means the covalent linkage between contiguous nucleosides in an oligonucleotide. As used herein “modified internucleoside linkage” means any internucleoside linkage other than a phosphodiester internucleoside linkage. “Phosphorothioate internucleoside linkage” is a modified internucleoside linkage in which one of the non-bridging oxygen atoms of a phosphodiester internucleoside linkage is replaced with a sulfur atom.

[0041] As used herein, “linker-nucleoside” means a nucleoside that links, either directly or indirectly, an oligonucleotide to a conjugate moiety. Linker-nucleosides are located within the conjugate linker of an oligomeric compound. Linker-nucleosides are not considered part of the oligonucleotide portion of an oligomeric compound even if they are contiguous with the oligonucleotide.

[0042] As used herein, “non-bicyclic modified sugar moiety” means a modified sugar moiety that comprises a modification, such as a substituent, that does not form a bridge between two atoms of the sugar to form a second ring.

[0043] As used herein, “mismatch” or “non-complementary” means a nucleobase of a first oligonucleotide that is not complementary with the corresponding nucleobase of a second oligonucleotide or target nucleic acid when the first and second oligonucleotide are aligned.

[0044] As used herein, “motif” means the pattern of unmodified and/or modified sugar moieties, nucleobases, and/or internucleoside linkages, in an oligonucleotide.

[0045] As used herein, “nucleobase” means an unmodified nucleobase or a modified nucleobase. As used herein an “unmodified nucleobase” is adenine (A), thymine (T), cytosine (C), uracil (U), or guanine (G). As used herein, a “modified nucleobase” is a group of atoms other than unmodified A, T, C, U, or G capable of pairing with at least one unmodified nucleobase. A “5-methyl cytosine” is a modified nucleobase. A universal base is a modified nucleobase that can pair with any one of the five unmodified nucleobases. As used herein, “nucleobase sequence” means the order of contiguous nucleobases in a nucleic acid or oligonucleotide independent of any sugar or internucleoside linkage modification.

[0046] As used herein, “nucleoside” means a compound comprising a nucleobase and a sugar moiety. The nucleobase and sugar moiety are each, independently, unmodified or modified. As used herein, “modified nucleoside” means a nucleoside comprising a modified nucleobase and/or a modified sugar moiety. Modified nucleosides include abasic nucleosides, which lack a nucleobase. “Linked nucleosides” are nucleosides that are connected in a contiguous sequence (i.e., no additional nucleosides are presented between those that are linked).

[0047] As used herein, “oligomeric compound” means an oligonucleotide and optionally one or more additional features, such as a conjugate group or terminal group. An oligomeric compound may be paired with a second oligomeric compound that is complementary to the first oligomeric compound or may be unpaired. A “singled-stranded oligomeric compound” is an unpaired oligomeric compound. The term “oligomeric duplex” means a duplex formed by two oligomeric compounds having complementary nucleobase sequences. Each oligomeric compound of an oligomeric duplex may be referred to as a “duplexed oligomeric compound.”

[0048] As used herein, “oligonucleotide” means a strand of linked nucleosides connected via internucleoside linkages, wherein each nucleoside and internucleoside linkage may be modified or unmodified. Unless otherwise indicated, oligonucleotides consist of 8-50 linked nucleosides. As used herein, “modified oligonucleotide” means an oligonucleotide, wherein at least one nucleoside or internucleoside linkage is modified. As used herein, “unmodified oligonucleotide” means an oligonucleotide that does not comprise any nucleoside modifications or internucleoside modifications.

[0049] As used herein, “pharmaceutically acceptable carrier or diluent” means any substance suitable for use in administering to a subject. Certain such carriers enable pharmaceutical compositions to be formulated as, for example, tablets, pills, dragees, capsules, liquids, gels, syrups, slurries, suspension and lozenges for the oral ingestion by a subject. In certain embodiments, a pharmaceutically acceptable carrier or diluent is sterile water, sterile saline, sterile buffer solution or sterile artificial cerebrospinal fluid.

[0050] As used herein “pharmaceutically acceptable salts” means physiologically and pharmaceutically acceptable salts of compounds. Pharmaceutically acceptable salts retain the desired biological activity of the parent compound and do not impart undesired toxicological effects thereto.

[0051] As used herein “pharmaceutical composition” means a mixture of substances suitable for administering to a subject. For example, a pharmaceutical composition may comprise an oligomeric compound and a sterile aqueous solution. In certain embodiments, a pharmaceutical composition shows activity in a free uptake assay in certain cell lines.

[0052] As used herein “prodrug” means a therapeutic agent in a form outside the body that is converted to a different form within a subject or cells thereof. Typically, conversion of a prodrug within the subject is facilitated by the action of an enzymes (e.g., endogenous or viral enzyme) or chemicals present in cells or tissues and/or by physiologic conditions.

[0053] As used herein, “kidney disease” means a condition of the kidney that reduces kidney function, such as urine production. Kidney diseases may be associated with or caused by a genetic mutation, diet, or a combination thereof. In certain embodiments, the kidney disease is chronic kidney disease (CKD).

[0054] As used herein, “kidney injury” means an injury of the kidney that reduces kidney function, such as urine production. Kidney injuries may be associated with or caused by a bodily impact, an infection, surgery, environmental toxin, or a combination thereof. In certain embodiment, the kidney injury is an acute kidney injury (AKI).

[0055] As used herein, “cardiac disorder” means a condition of the heart that reduces heart function, such as rhythm or circulation. Cardiac disorders may be associated with or caused by a genetic mutation, diet, or a combination thereof. In certain embodiments, the cardiac disorder is heart failure, hyperkalemia, a cardiomyopathy, or a cardiac arrhythmia.

[0056] As used herein, “cardiac injury” means damage to the heart that reduces heart function, such as rhythm or circulation. Cardiac injuries may be associated with or caused by a bodily impact, an infection, surgery, environmental toxin, or a combination thereof. The cardiac injury may be a myocardial infarction (MI).

[0057] As used herein, “reducing or inhibiting the amount or activity” refers to a reduction or blockade of the transcriptional expression or activity relative to the transcriptional expression or activity in an untreated or control sample and does not necessarily indicate a total elimination of transcriptional expression or activity.

[0058] As used herein, “reduced urine output” means an individual's a urine output is reduced relative to that of a healthy control subject that does not have a kidney injury or a kidney disease. In certain embodiments, administering an oligomeric compound disclosed herein or a pharmaceutical composition thereof to an individual with a kidney injury or kidney disease increases the individual's urine output relative to the individual's urine output before administering.

[0059] As used herein, “elevated serum creatinine levels” means an individual's serum creatinine levels are elevated relative to that of a healthy control subject that does not have a kidney injury or a kidney disease. In certain embodiments, administering an oligomeric compound disclosed herein or a pharmaceutical composition thereof to an individual with a kidney injury or kidney disease reduces the individual's serum creatinine levels relative to the individual's serum creatinine levels before administering.

[0060] As used herein, “elevated blood pressure” means a systolic blood pressure greater than 140 mmHg and/or a diastolic blood pressure greater than 90 mmHg. In certain embodiments, administering an oligomeric compound disclosed herein or a pharmaceutical composition thereof to an individual with a kidney injury or kidney disease reduces the individual's blood pressure relative to the individual's blood pressure before administering.

[0061] As used herein, “RNA” means an RNA transcript and includes pre-mRNA and mature mRNA unless otherwise specified.

[0062] As used herein, “RNAi compound” means an antisense compound that acts, at least in part, through RISC or Ago2 to modulate a target nucleic acid and/or protein encoded by a target nucleic acid. RNAi compounds include, but are not limited to double-stranded siRNA, single-stranded RNA (ssRNA), and microRNA, including microRNA mimics. In certain embodiments, an RNAi compound modulates the amount, activity, and/or splicing of a target nucleic acid. The term RNAi compound excludes antisense compounds that act through RNase H.

[0063] As used herein, “self-complementary” in reference to an oligonucleotide means an oligonucleotide that at least partially hybridizes to itself.

[0064] As used herein, “standard cell assay” means the assay described in Example 1 and reasonable variations thereof.

[0065] As used herein, “stereorandom” in the context of a population of molecules of identical molecular formula means a chiral center having a random stereochemical configuration. For example, in a population of molecules comprising a stereorandom chiral center, the number of molecules having the (S) configuration of the stereorandom chiral center may be but is not necessarily the same as the number of molecules having the (R) configuration of the stereorandom chiral center. The stereochemical configuration of a chiral center is considered random when it is the result of a synthetic method that is not designed to control the stereochemical configuration. In certain embodiments, a stereorandom chiral center is a stereorandom phosphorothioate internucleoside linkage.

[0066] As used herein, “subject” means a human or non-human animal. In certain embodiments, the subject is a human.

[0067] As used herein, “sugar moiety” means an unmodified sugar moiety or a modified sugar moiety. As used herein, “unmodified sugar moiety” means a 2′-OH(H) ribosyl moiety, as found in RNA (an “unmodified RNA sugar moiety”), or a 2′-H(H) deoxyribosyl moiety, as found in DNA (an “unmodified DNA sugar moiety”). Unmodified sugar moieties have one hydrogen at each of the 1′, 3′, and 4′ positions, an oxygen at the 3′ position, and two hydrogens at the 5′ position. As used herein, “modified sugar moiety” or “modified sugar” means a modified furanosyl sugar moiety or a sugar surrogate.

[0068] As used herein, “sugar surrogate” means a modified sugar moiety having other than a furanosyl moiety that can link a nucleobase to another group, such as an internucleoside linkage, conjugate group, or terminal group in an oligonucleotide. Modified nucleosides comprising sugar surrogates can be incorporated into one or more positions within an oligonucleotide and such oligonucleotides are capable of hybridizing to complementary oligomeric compounds or nucleic acids.

[0069] As used herein, “symptom” means any physical feature or test result that indicates the existence or extent of a disease or disorder. In certain embodiments, a symptom is apparent to a subject or to a medical professional examining or testing said subject.

[0070] As used herein, “target nucleic acid” and “target RNA” mean a nucleic acid that an antisense compound is designed to affect.

[0071] As used herein, “target region” means a portion of a target nucleic acid to which an oligomeric compound is designed to hybridize.

[0072] As used herein, “terminal group” means a chemical group or group of atoms that is covalently linked to a terminus of an oligonucleotide.

[0073] As used herein, “therapeutically effective amount” means an amount of a pharmaceutical agent that provides a therapeutic benefit to a subject. For example, a therapeutically effective amount improves a symptom of a disease.

### CERTAIN EMBODIMENTS

[0074] The present disclosure provides the following non-limiting numbered embodiments:
[0075] 1. Embodiment 1. An oligomeric compound comprising a modified oligonucleotide consisting of 12 to 50, 12 to 45, 12 to 40, 12 to 35, 12 to 30, 12 to 25, or 12 to 20 linked nucleosides, wherein the nucleobase sequence of the modified oligonucleotide is at least 90% complementary to an equal length portion of a NLRP3 nucleic acid, and wherein the modified oligonucleotide comprises at least one modification selected from a modified sugar moiety and a modified internucleoside linkage.
[0076] 2. Embodiment 2. An oligomeric compound comprising a modified oligonucleotide consisting of 12 to 30 linked nucleosides and having a nucleobase sequence comprising at least 8, 9, 10, 11, 12, 13, 14, 15, 16, 17, 18, 19, or 20 contiguous nucleobases complementary to an equal length portion of the nucleobase sequence of any one of the compounds of Tables 2-11.
[0077] 3. Embodiment 3. An oligomeric compound comprising a modified oligonucleotide consisting of 12 to 50, 12 to 45, 12 to 40, 12 to 35, 12 to 30, 12 to 25, or 12 to 20 linked nucleosides and having a nucleobase sequence comprising at least 8, at least 9, at least 10, at least 11, at least 12, at least 13, at least 14, at least 15, at least 16, at least 17, at least 18, at least 19, or at least 20 contiguous nucleobases complementary to an equal length portion of nucleobases a hotspot region of Table 1.
[0078] 4. Embodiment 4. The oligomeric compound of embodiment 3, wherein the modified oligonucleotide comprises at least 8, at least 9, at least 10, at least 11, at least 12, at least 13, at least 14, at least 15, at least 16, at least 17, at least 18, at least 19, or at least 20 contiguous nucleobases of the nucleobase sequence of an oligonucleotide of Table 1.
[0079] 5. Embodiment 5. An oligomeric compound comprising a modified oligonucleotide consisting of 16 linked nucleosides, wherein the modified oligonucleotide has a nucleobase sequence of SEQ ID NO: 1454.
[0080] 6. Embodiment 6. An oligomeric compound comprising a modified oligonucleotide consisting of 16 linked nucleosides, wherein the modified oligonucleotide has a nucleobase sequence of SEQ ID NO: 628.
[0081] 7. Embodiment 7. An oligomeric compound comprising a modified oligonucleotide consisting of 16 linked nucleosides, wherein the modified oligonucleotide has a nucleobase sequence of SEQ ID NO: 178.
[0082] 8. Embodiment 8. An oligomeric compound comprising a modified oligonucleotide consisting of 16 linked nucleosides, wherein the modified oligonucleotide has a nucleobase sequence of SEQ ID NO: 420.
[0083] 9. Embodiment 9. The oligomeric compound of any one of embodiments 1-8, wherein the modified oligonucleotide has a nucleobase sequence that is at least 80%, 85%, 90%, 95%, or 100% complementary to an equal length portion of a nucleobase sequence selected from SEQ ID NO: 1 or SEQ ID NO: 2 when measured across the entire nucleobase sequence of the modified oligonucleotide.
[0084] 10. Embodiment 10. The oligomeric compound of any one of embodiments 1-9, wherein at least one modified nucleoside comprises a modified sugar moiety.
[0085] 11. Embodiment 11. The oligomeric compound of embodiment 10, wherein the modified sugar moiety comprises a bicyclic sugar moiety.
[0086] 12. Embodiment 12. The oligomeric compound of embodiment 11, wherein the bicyclic sugar moiety comprises a 2′-4′ bridge selected from —O—CH₂—; and —O—CH(CH₃)—.
[0087] 13. Embodiment 13. The oligomeric compound of embodiment 10, wherein the modified sugar moiety comprises a non-bicyclic modified sugar moiety.
[0088] 14. Embodiment 14. The oligomeric compound of embodiment 13, wherein the non-bicyclic modified sugar moiety comprises a 2′-MOE sugar moiety or 2′-OMe sugar moiety.
[0089] 15. Embodiment 15. The oligomeric compound of any one of embodiments 1-9, wherein at least one modified nucleoside comprises a sugar surrogate.
[0090] 16. Embodiment 16. The oligomeric compound of embodiment 15, wherein the sugar surrogate is selected from morpholino and PNA.
[0091] 17. Embodiment 17. The oligomeric compound of any of embodiments 1-16, wherein the modified oligonucleotide has a sugar motif comprising:
   [0092] a 5′ wing segment consisting of 1-5 linked nucleosides;
   [0093] a gap segment consisting of 6-10 linked nucleosides; and
   [0094] a 3′ wing segment consisting of 1-5 linked nucleosides,
   [0095] wherein each nucleoside of the 5′ wing segment and each nucleoside of the 3′ wing segment comprises a modified sugar moiety, and wherein each nucleoside of the gap segment comprises an unmodified 2′-deoxyribosyl sugar moiety.
[0096] 18. Embodiment 18. The oligomeric compound of any one of embodiments 1-17, wherein the modified oligonucleotide comprises at least one modified internucleoside linkage.
[0097] 19. Embodiment 19. The oligomeric compound of embodiment 18, wherein the modified internucleoside linkage is a phosphorothioate internucleoside linkage.
[0098] 20. Embodiment 20. The oligomeric compound of embodiment 18, wherein each internucleoside linkage of the modified oligonucleotide is a modified internucleoside linkage.
[0099] 21. Embodiment 21. The oligomeric compound of any one of embodiments 1-19, wherein the modified oligonucleotide comprises at least one phosphodiester internucleoside linkage.
[0100] 22. Embodiment 22. The oligomeric compound of embodiment 20, wherein each internucleoside linkage is independently selected from a phosphodiester internucleoside linkage or a phosphorothioate internucleoside linkage.
[0101] 23. Embodiment 23. The oligomeric compound of any of embodiments 1-22, wherein the modified oligonucleotide comprises at least one modified nucleobase.
[0102] 24. Embodiment 24. The oligomeric compound of embodiment 23, wherein the modified nucleobase is a 5-methyl cytosine.
[0103] 25. Embodiment 25. The oligomeric compound of any of embodiments 1-24, wherein the modified oligonucleotide consists of 12-30, 12-22, 12-20, 14-20, 15-25, 16-20, 18-22 or 18-20 linked nucleosides.
[0104] 26. Embodiment 26. The oligomeric compound of any of embodiments 1-25, wherein the modified oligonucleotide consists of 16 linked nucleosides.
[0105] 27. Embodiment 27. The oligomeric compound of embodiment 26, wherein each of nucleosides 1-3 and 14-16 (from 5′ to 3′) is a cEt nucleoside and each of nucleosides 4-13 is a 2′-deoxynucleoside.
[0106] 28. Embodiment 28. The oligomeric compound of embodiment 26, wherein each of nucleosides 1, 3, 15 and 16 (from 5′ to 3′) is a cEt nucleoside, nucleosides 2, 13 and 14 is a 2′-MOE nucleoside, and each of nucleosides 4-12 is a 2′-deoxynucleoside.
[0107] 29. Embodiment 29. The oligomeric compound of any of embodiments 1-28, consisting of the modified oligonucleotide.
[0108] 30. Embodiment 30. The oligomeric compound of any of embodiments 1-28, comprising a conjugate group comprising a conjugate moiety and a conjugate linker.
[0109] 31. Embodiment 31. The oligomeric compound of embodiment 30, wherein the conjugate group comprises 1-3 N-Acetylgalactosamine (GalNAc) groups.
[0110] 32. Embodiment 32. The oligomeric compound of embodiments 30 or 31, wherein the conjugate linker consists of a single bond.
[0111] 33. Embodiment 33. The oligomeric compound of embodiment 32, wherein the conjugate linker is cleavable.
[0112] 34. Embodiment 34. The oligomeric compound of embodiment 33, wherein the conjugate linker comprises 1-3 linker-nucleosides.
[0113] 35. Embodiment 35. The oligomeric compound of any of embodiments 30-34, wherein the conjugate group is attached to the modified oligonucleotide at the 5′-end of the modified oligonucleotide.
[0114] 36. Embodiment 36. The oligomeric compound of any of embodiments 30-35, wherein the conjugate group is attached to the modified oligonucleotide at the 3′-end of the modified oligonucleotide.
[0115] 37. Embodiment 37. The oligomeric compound of any of embodiments 1-36 comprising a terminal group.
[0116] 38. Embodiment 38. The oligomeric compound of any of embodiments 1-37 wherein the oligomeric compound is a single-stranded oligomeric compound.
[0117] 39. Embodiment 39. The oligomeric compound of any of embodiments 1-33 or 35-38, wherein the oligomeric compound does not comprise linker-nucleosides.
[0118] 40. Embodiment 40. An oligomeric duplex comprising an oligomeric compound of any of embodiments 1-37 or 39.
[0119] 41. Embodiment 41. An antisense compound comprising or consisting of an oligomeric compound of any of embodiments 1-39 or an oligomeric duplex of embodiment 40.
[0120] 42. Embodiment 42. A modified oligonucleotide according to the following chemical structure:

[chemical structure]

or a salt thereof.
[0121] 43. Embodiment 43. The modified oligonucleotide of embodiment 42, which is a sodium salt or a potassium salt.
[0122] 44. Embodiment 44. A modified oligonucleotide according to the following chemical structure:

[chemical structure]

[0123] 45. Embodiment 45. A modified oligonucleotide according to the following chemical notation:
   [0124] ^{m}Cₖₛ^{m}CₑₛTₖₛT_{ds}T_{ds}T_{ds}^{m}C_{ds}G_{ds}A_{ds}A_{ds}T_{ds}T_{ds}TₑₛGₑₛ^{m}Cₖₛ^{m}Cₖ (SEQ ID NO: 420); wherein
      [0125] A=an adenine nucleobase,
      [0126] mC=a 5-methyl cytosine nucleobase,
      [0127] G=a guanine nucleobase,
      [0128] T=a thymine nucleobase,
      [0129] k=a cEt modified sugar moiety,
      [0130] e=a 2′-MOE modified sugar moiety,
      [0131] d=a 2′-deoxyribose sugar, and
      [0132] s=a phosphorothioate internucleoside linkage.
[0133] 46. Embodiment 46. A pharmaceutical composition comprising the oligomeric compound of any of embodiments 1-39, the oligomeric duplex of embodiment 40, the antisense compound of embodiment 41, or the modified oligonucleotides of any one of embodiments 42-45; and a pharmaceutically acceptable carrier or diluent.
[0134] 47. Embodiment 47. The pharmaceutical composition of embodiment 46, wherein the pharmaceutically acceptable carrier or diluent comprises phosphate buffered saline.
[0135] 48. Embodiment 48. The pharmaceutical composition of embodiment 47, consisting essentially of the oligomeric compound, antisense compound or oligomeric duplex, and phosphate buffered saline.
[0136] 49. Embodiment 49. A method comprising administering to a subject the oligomeric compound of any of embodiments 1-39, the oligomeric duplex of embodiment 40, the antisense compound of embodiment 41, or the modified oligonucleotides of any one of embodiments 42-45, or the pharmaceutical composition of any of embodiments 46-48.
[0137] 50. Embodiment 50. A method of treating a kidney disease or kidney injury comprising administering to a subject having or at risk for developing a kidney disease or kidney injury a therapeutically effective amount of the oligomeric compound of any of embodiments 1-39, the oligomeric duplex of embodiment 40, the antisense compound of embodiment 41, or the modified oligonucleotides of any one of embodiments 42-45, or the pharmaceutical composition of any of embodiments 46-48, thereby treating the kidney disease or kidney injury.
[0138] 51. Embodiment 51. A method of reducing NLRP3 RNA or NLRP3 protein in a kidney, liver or heart of a subject having or at risk for developing a kidney disease or kidney injury comprising administering a therapeutically effective amount of the compound of any of embodiments 1-39, the oligomeric duplex of embodiment 40, the antisense compound of embodiment 41, or the modified oligonucleotides of any one of embodiments 42-45, or the pharmaceutical composition of any of embodiments 46-48, thereby reducing NLRP3 RNA or NLRP3 protein in the kidney, liver or heart.
[0139] 52. Embodiment 52. The method of embodiment 50 or 51, wherein the kidney disease is chronic kidney disease (CKD).
[0140] 53. Embodiment 53. The method of embodiment 50 or 51, wherein the kidney injury is acute kidney injury (AKI).
[0141] 54. Embodiment 54. The method of any one of embodiments 50-53, wherein at least one symptom of the kidney disease or kidney injury is ameliorated.
[0142] 55. Embodiment 55. The method of embodiment 54, wherein the symptom is selected from nausea, vomiting, loss of appetite, reduced urine output, elevated serum creatinine levels, muscle cramping, swelling, itching, chest pain, shortness of breath and elevated blood pressure.
[0143] 56. Embodiment 56. The method of any of embodiments 50-55, wherein the method prevents or slows progression of the kidney disease or kidney injury.
[0144] 57. Embodiment 57. Use of the oligomeric compound of any of embodiments 1-39, the oligomeric duplex of embodiment 40, the antisense compound of embodiment 41, or the modified oligonucleotides of any one of embodiments 42-45, or the pharmaceutical composition of any of embodiments 46-48 for the treatment of a kidney disease or kidney injury.
[0145] 58. Embodiment 58. The use of embodiment 57, wherein the kidney disease is CKD.
[0146] 59. Embodiment 59. The use of embodiment 57, wherein the kidney injury is AKI.

[0147] I. Certain Oligonucleotides

[0148] In certain embodiments, provided herein are oligomeric compounds comprising oligonucleotides, which consist of linked nucleosides. Oligonucleotides may be unmodified oligonucleotides (RNA or DNA) or may be modified oligonucleotides. Modified oligonucleotides comprise at least one modification relative to unmodified RNA or DNA. That is, modified oligonucleotides comprise at least one modified nucleoside (comprising a modified sugar moiety and/or a modified nucleobase) and/or at least one modified internucleoside linkage.

[0149] A. Certain Modified Nucleosides

[0150] Modified nucleosides comprise a modified sugar moiety or a modified nucleobase or both a modified sugar moiety and a modified nucleobase.

[0151] 1. Certain Sugar Moieties

[0152] In certain embodiments, modified sugar moieties are non-bicyclic modified sugar moieties. In certain embodiments, modified sugar moieties are bicyclic or tricyclic sugar moieties. In certain embodiments, modified sugar moieties are sugar surrogates. Such sugar surrogates may comprise one or more substitutions corresponding to those of other types of modified sugar moieties.

[0153] In certain embodiments, modified sugar moieties are non-bicyclic modified sugar moieties comprising a furanosyl ring with one or more substituent groups none of which bridges two atoms of the furanosyl ring to form a bicyclic structure. Such non-bridging substituents may be at any position of the furanosyl, including but not limited to substituents at the 2′, 4′, and/or 5′ positions. In certain embodiments one or more non-bridging substituent of non-bicyclic modified sugar moieties is branched. Examples of 2′-substituent groups suitable for non-bicyclic modified sugar moieties include but are not limited to: 2′-F, 2′-OCH₃ (“OMe” or “O-methyl”), and 2′-O(CH₂)₂OCH₃ (“MOE”). In certain embodiments, 2′-substituent groups are selected from among: halo, allyl, amino, azido, SH, CN, OCN, CF₃, OCF₃, O—C₁-C₁₀ alkoxy, O—C₁-C₁₀ substituted alkoxy, O—C₁-C₁₀ alkyl, O—C₁-C₁₀ substituted alkyl, S-alkyl, N(Rₘ)-alkyl, O-alkenyl, S-alkenyl, N(Rₘ)-alkenyl, O-alkynyl, S-alkynyl, N(Rₘ)-alkynyl, O-alkylenyl-O-alkyl, alkynyl, alkaryl, aralkyl, O-alkaryl, O-aralkyl, O(CH₂)₂SCH₃, O(CH₂)₂ON(Rₘ)(Rₙ) or OCH₂C(═O)—N(Rₘ)(Rₙ), where each Rₘ and Rₙ is, independently, H, an amino protecting group, or substituted or unsubstituted C₁-C₁₀ alkyl, and the 2′-substituent groups described in Cook et al., U.S. Pat. No. 6,531,584; Cook et al., U.S. Pat. No. 5,859,221; and Cook et al., U.S. Pat. No. 6,005,087. Certain embodiments of these 2′-substituent groups can be further substituted with one or more substituent groups independently selected from among: hydroxyl, amino, alkoxy, carboxy, benzyl, phenyl, nitro (NO₂), thiol, thioalkoxy, thioalkyl, halogen, alkyl, aryl, alkenyl and alkynyl. Examples of 4′-substituent groups suitable for non-bicyclic modified sugar moieties include but are not limited to alkoxy (e.g., methoxy), alkyl, and those described in Manoharan et al., WO 2015/106128. Examples of 5′-substituent groups suitable for non-bicyclic modified sugar moieties include but are not limited to: 5-methyl (R or S), 5′-vinyl, and 5′-methoxy. In certain embodiments, non-bicyclic modified sugar moieties comprise more than one non-bridging sugar substituent, for example, 2′-F-5′-methyl sugar moieties and the modified sugar moieties and modified nucleosides described in Migawa et al., WO 2008/101157 and Rajeev et al., US2013/0203836).

[0154] In certain embodiments, a 2′-substituted non-bicyclic modified nucleoside comprises a sugar moiety comprising a non-bridging 2′-substituent group selected from: F, NH₂, N₃, OCF₃, OCH₃, O(CH₂)₃NH₂, CH₂CH═CH₂, OCH₂CH═CH₂, OCH₂CH₂OCH₃, O(CH₂)₂SCH₃, O(CH₂)₂ON(Rₘ)(Rₙ), O(CH₂)₂O(CH₂)₂N(CH₃)₂, and N-substituted acetamide (OCH₂C(═O)—N(Rₘ)(Rₙ)), where each Rₘ and Rₙ is, independently, H, an amino protecting group, or substituted or unsubstituted C₁-C₁₀ alkyl.

[0155] In certain embodiments, a 2′-substituted nucleoside non-bicyclic modified nucleoside comprises a sugar moiety comprising a non-bridging 2′-substituent group selected from: F, OCF₃, OCH₃, OCH₂CH₂OCH₃, O(CH₂)₂SCH₃, O(CH₂)₂ON(CH₃)₂, O(CH₂)₂O(CH₂)₂N(CH₃)₂, and OCH₂C(═O)—N(H)CH₃ (“NMA”).

[0156] In certain embodiments, a 2′-substituted non-bicyclic modified nucleoside comprises a sugar moiety comprising a non-bridging 2′-substituent group selected from: F, OCH₃, and OCH₂CH₂OCH₃.

[0157] Certain modified sugar moieties comprise a substituent that bridges two atoms of the furanosyl ring to form a second ring, resulting in a bicyclic sugar moiety. In certain such embodiments, the bicyclic sugar moiety comprises a bridge between the 4′ and the 2′ furanose ring atoms. Examples of such 4′ to 2′ bridging sugar substituents include but are not limited to: 4′-CH₂-2′, 4′-(CH₂)₂-2′, 4′-(CH₂)₃-2′, 4′-CH₂—O-2′ (“LNA”), 4′-CH₂—S-2′, 4′-(CH₂)₂—O-2′ (“ENA”), 4′-CH(CH₃)—O-2′ (referred to as “constrained ethyl” or “cEt”), 4′-CH₂—O—CH₂-2′, 4′-CH₂—N(R)-2′, 4′-CH(CH₂OCH₃)—O-2′ (“constrained MOE” or “cMOE”) and analogs thereof (see, e.g., Seth et al., U.S. Pat. No. 7,399,845, Bhat et al., U.S. Pat. No. 7,569,686, Swayze et al., U.S. Pat. No. 7,741,457, and Swayze et al., U.S. Pat. No. 8,022,193), 4′-C(CH₃)(CH₃)—O-2′ and analogs thereof (see, e.g., Seth et al., U.S. Pat. No. 8,278,283), 4′-CH₂—N(OCH₃)-2′ and analogs thereof (see, e.g., Prakash et al., U.S. Pat. No. 8,278,425), 4′-CH₂—O—N(CH₃)-2′ (see, e.g., Allerson et al., U.S. Pat. No. 7,696,345 and Allerson et al., U.S. Pat. No. 8,124,745), 4′-CH₂—C(H)(CH₃)-2′ (see, e.g., Zhou, et al., J. Org. Chem., 2009, 74, 118-134), 4′-CH₂—C(═CH₂)-2′ and analogs thereof (see e.g., Seth et al., U.S. Pat. No. 8,278,426), 4′-C(RₐR_{b})—N(R)—O-2′, 4′-C(RₐR_{b})—O—N(R)-2′, 4′-CH₂—O—N(R)-2′, and 4′-CH₂—N(R)—O- 2′, wherein each R, Rₐ, and R_{b} is, independently, H, a protecting group, or C₁-C₁₂ alkyl (see, e.g. Imanishi et al., U.S. Pat. No. 7,427,672).

[0158] In certain embodiments, such 4′ to 2′ bridges independently comprise from 1 to 4 linked groups independently selected from: —[C(Rₐ)(R_{b})]ₙ—, —[C(Rₐ)(R_{b})]ₙ—O—, —C(R_{b})═C(R_{b})—, —C(Rₐ)═N—, —C(═NRₐ)—, —C(═O)—, —C(═S)—, —O—, —Si(Rₐ)₂—, —S(═O)ₓ—, and —N(Rₐ)—; wherein: x is 0, 1, or 2; n is 1, 2, 3, or 4; each Rₐ and R_{b} is, independently selected from: H, a protecting group, hydroxyl, C₁-C₁₂ alkyl, substituted C₁-C₁₂ alkyl, C₂-C₁₂ alkenyl, substituted C₂-C₁₂ alkenyl, C₂-C₁₂ alkynyl, substituted C₂-C₁₂ alkynyl, C₅-C₂₀ aryl, substituted C₅-C₂₀ aryl, heterocycle radical, substituted heterocycle radical, heteroaryl, substituted heteroaryl, C₅-C₇ alicyclic radical, substituted C₅-C₇ alicyclic radical, halogen, OJ₁, NJ₁J₂, SJ₁, N₃, COOJ₁, acyl (C(═O)—H), substituted acyl, CN, sulfonyl (S(═O)₂-J₁), and sulfoxyl (S(═O)-J₁); and each J₁ and J₂ is, independently selected from: H, C₁-C₁₂ alkyl, substituted C₁-C₁₂ alkyl, C₂-C₁₂ alkenyl, substituted C₂-C₁₂ alkenyl, C₂-C₁₂ alkynyl, substituted C₂-C₁₂ alkynyl, C₅-C₂₀ aryl, substituted C₅-C₂₀ aryl, acyl (C(═O)—H), substituted acyl, a heterocycle radical, a substituted heterocycle radical, C₁-C₁₂ aminoalkyl, substituted C₁-C₁₂ aminoalkyl, and a protecting group.

[0159] Additional bicyclic sugar moieties are known in the art, see, for example: Freier et al., Nucleic Acids Research, 1997, 25(22), 4429-4443, Albaek et al., J. Org. Chem., 2006, 71, 7731-7740, Singh et al., Chem. Commun., 1998, 4, 455-456; Koshkin et al., Tetrahedron, 1998, 54, 3607-3630; Kumar et al., Bioorg. Med. Chem. Lett., 1998, 8, 2219-2222; Singh et al., J. Org. Chem., 1998, 63, 10035-10039; Srivastava et al., J. Am. Chem. Soc., 2007, 129, 8362-8379; Wengel et al., U.S. Pat. No. 7,053,207; Imanishi et al., U.S. Pat. No. 6,268,490; Imanishi et al. U.S. Pat. No. 6,770,748; Imanishi et al., U.S. RE44,779; Wengel et al., U.S. Pat. No. 6,794,499; Wengel et al., U.S. Pat. No. 6,670,461; Wengel et al., U.S. Pat. No. 7,034,133; Wengel et al., U.S. Pat. No. 8,080,644; Wengel et al., U.S. Pat. No. 8,034,909; Wengel et al., U.S. Pat. No. 8,153,365; Wengel et al., U.S. Pat. No. 7,572,582; and Ramasamy et al., U.S. Pat. No. 6,525,191; Torsten et al., WO 2004/106356; Wengel et al., WO 1999/014226; Seth et al., WO 2007/134181; Seth et al., U.S. Pat. No. 7,547,684; Seth et al., U.S. Pat. No. 7,666,854; Seth et al., U.S. Pat. No. 8,088,746; Seth et al., U.S. Pat. No. 7,750,131; Seth et al., U.S. Pat. No. 8,030,467; Seth et al., U.S. Pat. No. 8,268,980; Seth et al., U.S. Pat. No. 8,546,556; Seth et al., U.S. Pat. No. 8,530,640; Migawa et al., U.S. Pat. No. 9,012,421; Seth et al., U.S. Pat. No. 8,501,805; and U.S. Patent Publication Nos. Allerson et al., US2008/0039618 and Migawa et al., US2015/0191727.

[0160] In certain embodiments, bicyclic sugar moieties and nucleosides incorporating such bicyclic sugar moieties are further defined by isomeric configuration. For example, an LNA nucleoside (described herein) may be in the α-L configuration or in the β-D configuration.

[chemical structure]

α-L-methyleneoxy (4′-CH₂—O-2′) or α-L-LNA bicyclic nucleosides have been incorporated into oligonucleotides that showed antisense activity (Frieden et al., Nucleic Acids Research, 2003, 21, 6365-6372). Herein, general descriptions of bicyclic nucleosides include both isomeric configurations. When the positions of specific bicyclic nucleosides (e.g., LNA or cEt) are identified in exemplified embodiments herein, they are in the β-D configuration, unless otherwise specified.

[0161] In certain embodiments, modified sugar moieties comprise one or more non-bridging sugar substituent and one or more bridging sugar substituent (e.g., 5′-substituted and 4′-2′ bridged sugars).

[0162] In certain embodiments, modified sugar moieties are sugar surrogates. In certain such embodiments, the oxygen atom of the sugar moiety is replaced, e.g., with a sulfur, carbon or nitrogen atom. In certain such embodiments, such modified sugar moieties also comprise bridging and/or non-bridging substituents as described herein. For example, certain sugar surrogates comprise a 4′-sulfur atom and a substitution at the 2′-position (see, e.g., Bhat et al., U.S. Pat. No. 7,875,733 and Bhat et al., U.S. Pat. No. 7,939,677) and/or the 5′ position.

[0163] In certain embodiments, sugar surrogates comprise rings having other than 5 atoms. For example, in certain embodiments, a sugar surrogate comprises a six-membered tetrahydropyran (“THP”). Such tetrahydropyrans may be further modified or substituted. Nucleosides comprising such modified tetrahydropyrans include but are not limited to hexitol nucleic acid (“HNA”), anitol nucleic acid (“ANA”), manitol nucleic acid (“MNA”) (see, e.g., Leumann, C J. Bioorg. & Med. Chem. 2002, 10, 841-854), fluoro HNA:

[chemical structure]

(“F-HNA”, see e.g. Swayze et al., U.S. Pat. No. 8,088,904; Swayze et al., U.S. Pat. No. 8,440,803; Swayze et al., U.S. Pat. No. 8,796,437; and Swayze et al., U.S. Pat. No. 9,005,906; F-HNA can also be referred to as a F-THP or 3′-fluoro tetrahydropyran), and nucleosides comprising additional modified THP compounds having the formula:

[chemical structure]

wherein, independently, for each of said modified THP nucleoside: Bx is a nucleobase moiety; T₃ and T₄ are each, independently, an internucleoside linking group linking the modified THP nucleoside to the remainder of an oligonucleotide or one of T₃ and T₄ is an internucleoside linking group linking the modified THP nucleoside to the remainder of an oligonucleotide and the other of T₃ and T₄ is H, a hydroxyl protecting group, a linked conjugate group, or a 5′ or 3′-terminal group; q₁, q₂, q₃, q₄, q₅, q₆ and q₇ are each, independently, H, C₁-C₆ alkyl, substituted C₁-C₆ alkyl, C₂-C₆ alkenyl, substituted C₂-C₆ alkenyl, C₂-C₆ alkynyl, or substituted C₂-C₆ alkynyl; and each of R₁ and R₂ is independently selected from among: hydrogen, halogen, substituted or unsubstituted alkoxy, NJ₁J₂, SJ₁, N₃, OC(═X)J₁, OC(═X)NJ₁J₂, NJ₃C(═X)NJ₁J₂, and CN, wherein X is O, S or NJ₁, and each J₁, J₂, and J₃ is, independently, H or C₁-C₆ alkyl.

[0164] In certain embodiments, modified THP nucleosides are provided wherein q₁, q₂, q₃, q₄, q₅, q₆ and q₇ are each H. In certain embodiments, at least one of q₁, q₂, q₃, q₄, q₅, q₆ and q₇ is other than H. In certain embodiments, at least one of q₁, q₂, q₃, q₄, q₅, q₆ and q₇ is methyl. In certain embodiments, modified THP nucleosides are provided wherein one of R₁ and R₂ is F. In certain embodiments, R₁ is F and R₂ is H, in certain embodiments, R₁ is methoxy and R₂ is H, and in certain embodiments, R₁ is methoxyethoxy and R₂ is H.

[0165] In certain embodiments, sugar surrogates comprise rings having more than 5 atoms and more than one heteroatom. For example, nucleosides comprising morpholino sugar moieties and their use in oligonucleotides have been reported (see, e.g., Braasch et al., Biochemistry, 2002, 41, 4503-4510 and Summerton et al., U.S. Pat. No. 5,698,685; Summerton et al., U.S. Pat. No. 5,166,315; Summerton et al., U.S. Pat. No. 5,185,444; and Summerton et al., U.S. Pat. No. 5,034,506). As used here, the term “morpholino” means a sugar surrogate having the following structure:

[chemical structure]

[0166] In certain embodiments, morpholinos may be modified, for example by adding or altering various substituent groups from the above morpholino structure. Such sugar surrogates are referred to herein as “modified morpholinos.”

[0167] In certain embodiments, sugar surrogates comprise acyclic moieties. Examples of nucleosides and oligonucleotides comprising such acyclic sugar surrogates include but are not limited to: peptide nucleic acid (“PNA”), acyclic butyl nucleic acid (see, e.g., Kumar et al., Org. Biomol. Chem., 2013, 11, 5853-5865), and nucleosides and oligonucleotides described in Manoharan et al., WO2011/133876.

[0168] Many other bicyclic and tricyclic sugar and sugar surrogate ring systems are known in the art that can be used in modified nucleosides.

[0169] 2. Certain Modified Nucleobases

[0170] In certain embodiments, modified oligonucleotides comprise one or more nucleoside comprising an unmodified nucleobase. In certain embodiments, modified oligonucleotides comprise one or more nucleoside comprising a modified nucleobase. In certain embodiments, modified oligonucleotides comprise one or more nucleoside that does not comprise a nucleobase, referred to as an abasic nucleoside.

[0171] In certain embodiments, modified nucleobases are selected from: 5-substituted pyrimidines, 6-azapyrimidines, alkyl or alkynyl substituted pyrimidines, alkyl substituted purines, and N-2, N-6 and O-6 substituted purines. In certain embodiments, modified nucleobases are selected from: 2-aminopropyladenine, 5-hydroxymethyl cytosine, xanthine, hypoxanthine, 2-aminoadenine, 6-N-methylguanine, 6-N-methyladenine, 2-propyladenine, 2-thiouracil, 2-thiothymine and 2-thiocytosine, 5-propynyl (—C≡C—CH₃) uracil, 5-propynylcytosine, 6-azouracil, 6-azocytosine, 6-azothymine, 5-ribosyluracil (pseudouracil), 4-thiouracil, 8-halo, 8-amino, 8-thiol, 8-thioalkyl, 8-hydroxyl, 8-aza and other 8-substituted purines, 5-halo, particularly 5-bromo, 5-trifluoromethyl, 5-halouracil, and 5-halocytosine, 7-methylguanine, 7-methyladenine, 2-F-adenine, 2-aminoadenine, 7-deazaguanine, 7-deazaadenine, 3-deazaguanine, 3-deazaadenine, 6-N-benzoyladenine, 2-N-isobutyrylguanine, 4-N-benzoylcytosine, 4-N-benzoyluracil, 5-methyl 4-N-benzoylcytosine, 5-methyl 4-N-benzoyluracil, universal bases, hydrophobic bases, promiscuous bases, size-expanded bases, and fluorinated bases. Further modified nucleobases include tricyclic pyrimidines, such as 1,3-diazaphenoxazine-2-one, 1,3-diazaphenothiazine-2-one and 9-(2-aminoethoxy)-1,3-diazaphenoxazine-2-one (G-clamp). Modified nucleobases may also include those in which the purine or pyrimidine base is replaced with other heterocycles, for example 7-deaza-adenine, 7-deazaguanosine, 2-aminopyridine and 2-pyridone. Further nucleobases include those disclosed in Merigan et al., U.S. Pat. No. 3,687,808, those disclosed in The Concise Encyclopedia Of Polymer Science And Engineering, Kroschwitz, J. I., Ed., John Wiley & Sons, 1990, 858-859; Englisch et al., Angewandte Chemie, International Edition, 1991, 30, 613; Sanghvi, Y. S., Chapter 15, Antisense Research and Applications, Crooke, S. T. and Lebleu, B., Eds., CRC Press, 1993, 273-288; and those disclosed in Chapters 6 and 15, Antisense Drug Technology, Crooke S. T., Ed., CRC Press, 2008, 163-166 and 442-443.

[0172] Publications that teach the preparation of certain of the above noted modified nucleobases as well as other modified nucleobases include without limitation, Manoharan et al., US2003/0158403; Manoharan et al., US2003/0175906; Dinh et al., U.S. Pat. No. 4,845,205; Spielvogel et al., U.S. Pat. No. 5,130,302; Rogers et al., U.S. Pat. No. 5,134,066; Bischofberger et al., U.S. Pat. No. 5,175,273; Urdea et al., U.S. Pat. No. 5,367,066; Benner et al., U.S. Pat. No. 5,432,272; Matteucci et al., U.S. Pat. No. 5,434,257; Gmeiner et al., U.S. Pat. No. 5,457,187; Cook et al., U.S. Pat. No. 5,459,255; Froehler et al., U.S. Pat. No. 5,484,908; Matteucci et al., U.S. Pat. No. 5,502,177; Hawkins et al., U.S. Pat. No. 5,525,711; Haralambidis et al., U.S. 5,552,540; Cook et al., U.S. Pat. No. 5,587,469; Froehler et al., U.S. Pat. No. 5,594,121; Switzer et al., U.S. Pat. No. 5,596,091; Cook et al., U.S. Pat. No. 5,614,617; Froehler et al., U.S. Pat. No. 5,645,985; Cook et al., U.S. Pat. No. 5,681,941; Cook et al., U.S. Pat. No. 5,811,534; Cook et al., U.S. Pat. No. 5,750,692; Cook et al., U.S. Pat. No. 5,948,903; Cook et al., U.S. Pat. No. 5,587,470; Cook et al., U.S. Pat. No. 5,457,191; Matteucci et al., U.S. Pat. No. 5,763,588; Froehler et al., U.S. Pat. No. 5,830,653; Cook et al., U.S. Pat. No. 5,808,027; Cook et al., 6,166,199; and Matteucci et al., U.S. Pat. No. 6,005,096.

[0173] 3. Certain Modified Internucleoside Linkages

[0174] In certain embodiments, nucleosides of modified oligonucleotides may be linked together using any internucleoside linkage. The two main classes of internucleoside linking groups are defined by the presence or absence of a phosphorus atom. Representative phosphorus-containing internucleoside linkages include but are not limited to phosphates, which contain a phosphodiester bond (“P═O”) (also referred to as unmodified or naturally occurring linkages), phosphotriesters, methylphosphonates, phosphoramidates, and phosphorothioates (“P═S”), and phosphorodithioates (“HS—P═S”). Representative non-phosphorus containing internucleoside linking groups include but are not limited to methylenemethylimino (—CH₂—N(CH₃)—O—CH₂—), thiodiester, thionocarbamate (—O—C(═O)(NH)—S—); siloxane (—O—SiH₂—O—); and N,N′-dimethylhydrazine (—CH₂—N(CH₃)—N(CH₃)—). Modified internucleoside linkages, compared to naturally occurring phosphate linkages, can be used to alter, typically increase, nuclease resistance of the oligonucleotide. In certain embodiments, internucleoside linkages having a chiral atom can be prepared as a racemic mixture, or as separate enantiomers. Methods of preparation of phosphorous-containing and non-phosphorous-containing internucleoside linkages are well known to those skilled in the art.

[0175] In certain embodiments, a modified internucleoside linkage is any of those described in WO/2021/030778, incorporated by reference herein. In certain embodiments, a modified internucleoside linkage comprises the formula:

[chemical structure]

wherein independently for each internucleoside linking group of the modified oligonucleotide:
[0176] X is selected from O or S;
[0177] R₁ is selected from H, C₁-C₆ alkyl, and substituted C₁-C₆ alkyl; and
[0178] T is selected from SO₂R₂, C(═O)R₃, and P(═O)R₄R₅, wherein:
[0179] R₂ is selected from an aryl, a substituted aryl, a heterocycle, a substituted heterocycle, an aromatic heterocycle, a substituted aromatic heterocycle, a diazole, a substituted diazole, a C₁-C₆ alkoxy, C₁-C₆ alkyl, C₁-C₆ alkenyl, C₁-C₆ alkynyl, substituted C₁-C₆ alkyl, substituted C₁-C₆ alkenyl substituted C₁-C₆ alkynyl, and a conjugate group;
[0180] R₃ is selected from an aryl, a substituted aryl, CH₃, N(CH₃)₂, OCH₃ and a conjugate group;
[0181] R₄ is selected from OCH₃, OH, C₁-C₆ alkyl, substituted C₁-C₆ alkyl and a conjugate group; and
[0182] R₅ is selected from OCH₃, OH, C₁-C₆ alkyl, and substituted C₁-C₆ alkyl.
   In certain embodiments, a modified internucleoside linkage comprises a mesyl phosphoramidate linking group having a formula:

[chemical structure]

In certain embodiments, a mesyl phosphoramidate internucleoside linkage may comprise a chiral center. In certain embodiments, modified oligonucleotides comprising (Rp) and/or (Sp) mesyl phosphoramidates comprise one or more of the following formulas, respectively, wherein “B” indicates a nucleobase:

[chemical structure]

[0183] Representative internucleoside linkages having a chiral center include but are not limited to alkylphosphonates and phosphorothioates. Modified oligonucleotides comprising internucleoside linkages having a chiral center can be prepared as populations of modified oligonucleotides comprising stereorandom internucleoside linkages, or as populations of modified oligonucleotides comprising phosphorothioate linkages in particular stereochemical configurations. In certain embodiments, populations of modified oligonucleotides comprise phosphorothioate internucleoside linkages wherein all of the phosphorothioate internucleoside linkages are stereorandom. Such modified oligonucleotides can be generated using synthetic methods that result in random selection of the stereochemical configuration of each phosphorothioate linkage. Nonetheless, as is well understood by those of skill in the art, each individual phosphorothioate of each individual oligonucleotide molecule has a defined stereoconfiguration.

[0184] In certain embodiments, populations of modified oligonucleotides are enriched for modified oligonucleotides comprising one or more particular phosphorothioate internucleoside linkages in a particular, independently selected stereochemical configuration. In certain embodiments, the particular configuration of the particular phosphorothioate linkage is present in at least 65% of the molecules in the population. In certain embodiments, the particular configuration of the particular phosphorothioate linkage is present in at least 70% of the molecules in the population. In certain embodiments, the particular configuration of the particular phosphorothioate linkage is present in at least 80% of the molecules in the population. In certain embodiments, the particular configuration of the particular phosphorothioate linkage is present in at least 90% of the molecules in the population. In certain embodiments, the particular configuration of the particular phosphorothioate linkage is present in at least 99% of the molecules in the population. Such chirally enriched populations of modified oligonucleotides can be generated using synthetic methods known in the art, e.g., methods described in Oka et al., JACS 125, 8307 (2003), Wan et al. Nuc. Acid. Res. 42, 13456 (2014), and WO 2017/015555. In certain embodiments, a population of modified oligonucleotides is enriched for modified oligonucleotides having at least one indicated phosphorothioate in the (Sp) configuration. In certain embodiments, a population of modified oligonucleotides is enriched for modified oligonucleotides having at least one phosphorothioate in the (Rp) configuration. In certain embodiments, modified oligonucleotides comprising (Rp) and/or (Sp) phosphorothioates comprise one or more of the following formulas, respectively, wherein “B” indicates a nucleobase:

[chemical structure]

[0185] Unless otherwise indicated, chiral internucleoside linkages of modified oligonucleotides described herein can be stereorandom or in a particular stereochemical configuration.

[0186] In certain embodiments, populations of modified oligonucleotides comprise mesyl phosphoramidate internucleoside linkages wherein all of the mesyl phosphoramidate internucleoside linkages are stereorandom. In certain embodiments, populations of modified oligonucleotides comprise mesyl phosphoramidate internucleoside linkages wherein one or mesyl phosphoramidate internucleoside linkages is enriched for a particular configuration. In certain embodiments, populations of modified oligonucleotides comprise mesyl phosphoramidate internucleoside linkages wherein each mesyl phosphoramidate internucleoside linkage is enriched for a particular configuration.

[0187] Neutral internucleoside linkages include, without limitation, phosphotriesters, methylphosphonates, MMI (3′-CH₂—N(CH₃)—O-5′), amide-3 (3′-CH₂—C(═O)—N(H)-5′), amide-4 (3′-CH₂—N(H)—C(═O)-5′), formacetal (3′-O—CH₂—O-5′), methoxypropyl, and thioformacetal (3′-S—CH₂—O-5′). Further neutral internucleoside linkages include nonionic linkages comprising siloxane (dialkylsiloxane), carboxylate ester, carboxamide, sulfide, sulfonate ester and amides (See for example: Carbohydrate Modifications in Antisense Research; Y. S. Sanghvi and P. D. Cook, Eds., ACS Symposium Series 580; Chapters 3 and 4, 40-65). Further neutral internucleoside linkages include nonionic linkages comprising mixed N, O, S and CH₂ component parts.

[0188] B. Certain Motifs

[0189] In certain embodiments, modified oligonucleotides comprise one or more modified nucleosides comprising a modified sugar moiety. In certain embodiments, modified oligonucleotides comprise one or more modified nucleosides comprising a modified nucleobase. In certain embodiments, modified oligonucleotides comprise one or more modified internucleoside linkage. In such embodiments, the modified, unmodified, and differently modified sugar moieties, nucleobases, and/or internucleoside linkages of a modified oligonucleotide define a pattern or motif. In certain embodiments, the patterns of sugar moieties, nucleobases, and internucleoside linkages are each independent of one another. Thus, a modified oligonucleotide may be described by its sugar motif, nucleobase motif and/or internucleoside linkage motif (as used herein, nucleobase motif describes the modifications to the nucleobases independent of the sequence of nucleobases).

[0190] 1. Certain Sugar Motifs

[0191] In certain embodiments, oligonucleotides comprise one or more type of modified sugar and/or unmodified sugar moiety arranged along the oligonucleotide or region thereof in a defined pattern or sugar motif. In certain instances, such sugar motifs include but are not limited to any of the sugar modifications discussed herein.

[0192] In certain embodiments, modified oligonucleotides comprise or consist of a region having a gapmer motif, which is defined by two external regions or “wings” and a central or internal region or “gap.” The three regions of a gapmer motif (the 5′-wing, the gap, and the 3′-wing) form a contiguous sequence of nucleosides wherein at least some of the sugar moieties of the nucleosides of each of the wings differ from at least some of the sugar moieties of the nucleosides of the gap. Specifically, at least the sugar moieties of the nucleosides of each wing that are closest to the gap segment (the 3′-most nucleoside of the 5′-wing and the 5′-most nucleoside of the 3′-wing) differ from the sugar moiety of the neighboring gap nucleosides, thus defining the boundary between the wings and the gap segment (i.e., the wing/gap junction). In certain embodiments, the sugar moieties within the gap are the same as one another. In certain embodiments, the gap segment includes one or more nucleoside having a sugar moiety that differs from the sugar moiety of one or more other nucleosides of the gap. In certain embodiments, the sugar motifs of the two wings are the same as one another (symmetric gapmer). In certain embodiments, the sugar motif of the 5′-wing differs from the sugar motif of the 3′-wing (asymmetric gapmer).

[0193] In certain embodiments, the wings of a gapmer comprise 1-5 nucleosides. In certain embodiments, each nucleoside of each wing of a gapmer is a modified nucleoside. In certain embodiments, at least one nucleoside of each wing of a gapmer is a modified nucleoside. In certain embodiments, at least two nucleosides of each wing of a gapmer are modified nucleosides. In certain embodiments, at least three nucleosides of each wing of a gapmer are modified nucleosides. In certain embodiments, at least four nucleosides of each wing of a gapmer are modified nucleosides.

[0194] In certain embodiments, the gap segment of a gapmer comprises 7-12 nucleosides. In certain embodiments, each nucleoside of the gap segment of a gapmer is an unmodified 2′-deoxynucleoside. In certain embodiments, at least one nucleoside of the gap segment of a gapmer is a modified nucleoside.

[0195] In certain embodiments, the gapmer is a deoxy gapmer. In certain embodiments, the nucleosides on the gap side of each wing/gap junction are unmodified 2′-deoxynucleosides and the nucleosides on the wing sides of each wing/gap junction are modified nucleosides. In certain embodiments, each nucleoside of the gap segment is an unmodified 2′-deoxynucleoside. In certain embodiments, each nucleoside of each wing of a gapmer is a modified nucleoside. In certain embodiments, each nucleoside of the gap comprises a 2′-β-D-deoxyribosyl sugar moiety. In certain embodiments, each nucleoside of each wing of a gapmer comprises a modified sugar moiety. In certain embodiments, at least one nucleoside of the gap of a gapmer comprises a modified sugar moiety. In certain embodiments, one nucleoside of the gap comprises a modified sugar moiety and each remaining nucleoside of the gap comprises a 2′-deoxyribosyl sugar moiety. In certain embodiments, at least one nucleoside of the gap of a gapmer comprises a 2′-OMe sugar moiety.

[0196] In certain embodiments, modified oligonucleotides comprise or consist of a region having a fully modified sugar motif. In such embodiments, each nucleoside of the fully modified region of the modified oligonucleotide comprises a modified sugar moiety. In certain embodiments, each nucleoside of the entire modified oligonucleotide comprises a modified sugar moiety. In certain embodiments, modified oligonucleotides comprise or consist of a region having a fully modified sugar motif, wherein each nucleoside within the fully modified region comprises the same modified sugar moiety, referred to herein as a uniformly modified sugar motif. In certain embodiments, a fully modified oligonucleotide is a uniformly modified oligonucleotide. In certain embodiments, each nucleoside of a uniformly modified comprises the same 2′-modification.

[0197] Herein, the lengths (number of nucleosides) of the three regions of a gapmer may be provided using the notation [# of nucleosides in the 5′-wing]-[# of nucleosides in the gap]-[# of nucleosides in the 3′-wing]. Thus, a 3-10-3 gapmer consists of 3 linked nucleosides in each wing and 10 linked nucleosides in the gap. Where such nomenclature is followed by a specific modification, that modification is the modification in each sugar moiety of each wing segment and the gap segment nucleosides comprise unmodified deoxynucleosides sugars. Thus, a 3-10-3 cEt gapmer consists of 3 linked cEt nucleosides in the 5′-wing, 10 linked deoxynucleosides in the gap, and 3 linked cEt nucleosides in the 3′-wing. Similarly, a 2-12-2 cEt gapmer consists of 2 linked cEt nucleosides in the 5′-wing, 12 linked deoxynucleosides in the gap, and 2 linked cEt nucleosides in the 3′-wing.

[0198] In certain embodiments, modified oligonucleotides are 3-10-3 BNA gapmers. In certain embodiments, modified oligonucleotides are 3-10-3 cEt gapmers. In certain embodiments, modified oligonucleotides are 3-10-3 LNA gapmers. In certain embodiments, modified oligonucleotides are 2-12-2 BNA gapmers. In certain embodiments, modified oligonucleotides are 2-12-2 cEt gapmers. In certain embodiments, modified oligonucleotides are 2-12-2 LNA gapmers. In certain embodiments, modified oligonucleotides are 3-9-4 MOE/cEt gapmers. In certain embodiments, modified oligonucleotides are 2-9-5 MOE/cEt gapmers.

[0199] 2. Certain Nucleobase Motifs

[0200] In certain embodiments, oligonucleotides comprise modified and/or unmodified nucleobases arranged along the oligonucleotide or region thereof in a defined pattern or motif. In certain embodiments, each nucleobase is modified. In certain embodiments, none of the nucleobases are modified. In certain embodiments, each purine or each pyrimidine is modified. In certain embodiments, each adenine is modified. In certain embodiments, each guanine is modified. In certain embodiments, each thymine is modified. In certain embodiments, each uracil is modified. In certain embodiments, each cytosine is modified. In certain embodiments, some or all of the cytosine nucleobases in a modified oligonucleotide are 5-methyl cytosines. In certain embodiments, all of the cytosine nucleobases are 5-methyl cytosines and all of the other nucleobases of the modified oligonucleotide are unmodified nucleobases.

[0201] In certain embodiments, modified oligonucleotides comprise a block of modified nucleobases. In certain such embodiments, the block is at the 3′-end of the oligonucleotide. In certain embodiments the block is within 3 nucleosides of the 3′-end of the oligonucleotide. In certain embodiments, the block is at the 5′-end of the oligonucleotide. In certain embodiments the block is within 3 nucleosides of the 5′-end of the oligonucleotide.

[0202] In certain embodiments, oligonucleotides having a gapmer motif comprise a nucleoside comprising a modified nucleobase. In certain such embodiments, one nucleoside comprising a modified nucleobase is in the gap segment of an oligonucleotide having a gapmer motif. In certain such embodiments, the sugar moiety of said nucleoside is a 2′-deoxyribosyl moiety. In certain embodiments, the modified nucleobase is selected from: a 2-thiopyrimidine and a 5-propynepyrimidine.

[0203] 3. Certain Internucleoside Linkage Motifs

[0204] In certain embodiments, oligonucleotides comprise modified and/or unmodified internucleoside linkages arranged along the oligonucleotide or region thereof in a defined pattern or motif. In certain embodiments, each internucleoside linking group is a phosphodiester internucleoside linkage (P═O). In certain embodiments, each internucleoside linking group of a modified oligonucleotide is a phosphorothioate internucleoside linkage (P═S). In certain embodiments, each internucleoside linkage of a modified oligonucleotide is independently selected from a phosphorothioate internucleoside linkage and phosphodiester internucleoside linkage. In certain embodiments, each phosphorothioate internucleoside linkage is independently selected from a stereorandom phosphorothioate a (Sp) phosphorothioate, and a (Rp) phosphorothioate. In certain embodiments, the sugar motif of a modified oligonucleotide is a gapmer and the internucleoside linkages within the gap segment are all modified. In certain such embodiments, some or all of the internucleoside linkages in the wings are unmodified phosphodiester internucleoside linkages. In certain embodiments, the terminal internucleoside linkages are modified. In certain embodiments, the sugar motif of a modified oligonucleotide is a gapmer, and the internucleoside linkage motif comprises at least one phosphodiester internucleoside linkage in at least one wing, wherein the at least one phosphodiester linkage is not a terminal internucleoside linkage, and the remaining internucleoside linkages are phosphorothioate internucleoside linkages. In certain such embodiments, all of the phosphorothioate linkages are stereorandom. In certain embodiments, all of the phosphorothioate linkages in the wings are (Sp) phosphorothioates, and the gap segment comprises at least one Sp, Sp, Rp motif. In certain embodiments, populations of modified oligonucleotides are enriched for modified oligonucleotides comprising such internucleoside linkage motifs.

[0205] C. Certain Lengths

[0206] It is possible to increase or decrease the length of an oligonucleotide without eliminating activity. For example, in Woolf et al. (Proc. Natl. Acad. Sci. USA 89:7305-7309, 1992), a series of oligonucleotides 13-25 nucleobases in length were tested for their ability to induce cleavage of a target RNA in an oocyte injection model. Oligonucleotides 25 nucleobases in length with 8 or 11 mismatch bases near the ends of the oligonucleotides were able to direct specific cleavage of the target RNA, albeit to a lesser extent than the oligonucleotides that contained no mismatches. Similarly, target specific cleavage was achieved using 13 nucleobase oligonucleotides, including those with 1 or 3 mismatches.

[0207] In certain embodiments, oligonucleotides (including modified oligonucleotides) can have any of a variety of ranges of lengths. In certain embodiments, oligonucleotides consist of X to Y linked nucleosides, where X represents the fewest number of nucleosides in the range and Y represents the largest number nucleosides in the range. In certain such embodiments, X and Y are each independently selected from 8, 9, 10, 11, 12, 13, 14, 15, 16, 17, 18, 19, 20, 21, 22, 23, 24, 25, 26, 27, 28, 29, 30, 31, 32, 33, 34, 35, 36, 37, 38, 39, 40, 41, 42, 43, 44, 45, 46, 47, 48, 49, and 50; provided that X<Y. For example, in certain embodiments, oligonucleotides consist of 12 to 13, 12 to 14, 12 to 15, 12 to 16, 12 to 17, 12 to 18, 12 to 19, 12 to 20, 12 to 21, 12 to 22, 12 to 23, 12 to 24, 12 to 25, 12 to 26, 12 to 27, 12 to 28, 12 to 29, 12 to 30, 13 to 14, 13 to 15, 13 to 16, 13 to 17, 13 to 18, 13 to 19, 13 to 20, 13 to 21, 13 to 22, 13 to 23, 13 to 24, 13 to 25, 13 to 26, 13 to 27, 13 to 28, 13 to 29, 13 to 30, 14 to 15, 14 to 16, 14 to 17, 14 to 18, 14 to 19, 14 to 20, 14 to 21, 14 to 22, 14 to 23, 14 to 24, 14 to 25, 14 to 26, 14 to 27, 14 to 28, 14 to 29, 14 to 30, 15 to 16, 15 to 17, 15 to 18, 15 to 19, 15 to 20, 15 to 21, 15 to 22, 15 to 23, 15 to 24, 15 to 25, 15 to 26, 15 to 27, 15 to 28, 15 to 29, 15 to 30, 16 to 17, 16 to 18, 16 to 19, 16 to 20, 16 to 21, 16 to 22, 16 to 23, 16 to 24, 16 to 25, 16 to 26, 16 to 27, 16 to 28, 16 to 29, 16 to 30, 17 to 18, 17 to 19, 17 to 20, 17 to 21, 17 to 22, 17 to 23, 17 to 24, 17 to 25, 17 to 26, 17 to 27, 17 to 28, 17 to 29, 17 to 30, 18 to 19, 18 to 20, 18 to 21, 18 to 22, 18 to 23, 18 to 24, 18 to 25, 18 to 26, 18 to 27, 18 to 28, 18 to 29, 18 to 30, 19 to 20, 19 to 21, 19 to 22, 19 to 23, 19 to 24, 19 to 25, 19 to 26, 19 to 29, 19 to 28, 19 to 29, 19 to 30, 20 to 21, 20 to 22, 20 to 23, 20 to 24, 20 to 25, 20 to 26, 20 to 27, 20 to 28, 20 to 29, 20 to 30, 21 to 22, 21 to 23, 21 to 24, 21 to 25, 21 to 26, 21 to 27, 21 to 28, 21 to 29, 21 to 30, 22 to 23, 22 to 24, 22 to 25, 22 to 26, 22 to 27, 22 to 28, 22 to 29, 22 to 30, 23 to 24, 23 to 25, 23 to 26, 23 to 27, 23 to 28, 23 to 29, 23 to 30, 24 to 25, 24 to 26, 24 to 27, 24 to 28, 24 to 29, 24 to 30, 25 to 26, 25 to 27, 25 to 28, 25 to 29, 25 to 30, 26 to 27, 26 to 28, 26 to 29, 26 to 30, 27 to 28, 27 to 29, 27 to 30, 28 to 29, 28 to 30, or 29 to 30 linked nucleosides.

[0208] D. Certain Modified Oligonucleotides

[0209] In certain embodiments, the above modifications (sugar, nucleobase, internucleoside linkage) are incorporated into a modified oligonucleotide. In certain embodiments, modified oligonucleotides are characterized by their modification motifs and overall lengths. In certain embodiments, such parameters are each independent of one another. Thus, unless otherwise indicated, each internucleoside linkage of an oligonucleotide having a gapmer sugar motif may be modified or unmodified and may or may not follow the gapmer modification pattern of the sugar modifications. For example, the internucleoside linkages within the wing regions of a sugar gapmer may be the same or different from one another and may be the same or different from the internucleoside linkages of the gap segment of the sugar motif. Likewise, such sugar gapmer oligonucleotides may comprise one or more modified nucleobase independent of the gapmer pattern of the sugar modifications. Unless otherwise indicated, all modifications are independent of nucleobase sequence.

[0210] E. Certain Populations of Modified Oligonucleotides

[0211] Populations of modified oligonucleotides in which all of the modified oligonucleotides of the population have the same molecular formula can be stereorandom populations or chirally enriched populations. All of the chiral centers of all of the modified oligonucleotides are stereorandom in a stereorandom population. In a chirally enriched population, at least one particular chiral center is not stereorandom in the modified oligonucleotides of the population. In certain embodiments, the modified oligonucleotides of a chirally enriched population are enriched for β-D ribosyl sugar moieties, and all of the phosphorothioate internucleoside linkages are stereorandom. In certain embodiments, the modified oligonucleotides of a chirally enriched population are enriched for both β-D ribosyl sugar moieties and at least one, particular phosphorothioate internucleoside linkage in a particular stereochemical configuration.

[0212] F. Nucleobase Sequence

[0213] In certain embodiments, oligonucleotides (unmodified or modified oligonucleotides) are further described by their nucleobase sequence. In certain embodiments oligonucleotides have a nucleobase sequence that is complementary to a second oligonucleotide or an identified reference nucleic acid, such as a target nucleic acid. In certain such embodiments, a region of an oligonucleotide has a nucleobase sequence that is complementary to a second oligonucleotide or an identified reference nucleic acid, such as a target nucleic acid. In certain embodiments, the nucleobase sequence of a region or entire length of an oligonucleotide is at least 50%, at least 60%, at least 70%, at least 80%, at least 85%, at least 90%, at least 95%, or 100% complementary to the second oligonucleotide or nucleic acid, such as a target nucleic acid.

[0214] II. Certain Oligomeric Compounds

[0215] In certain embodiments, provided herein are oligomeric compounds, which consist of an oligonucleotide (modified or unmodified) and optionally one or more conjugate groups and/or terminal groups. Conjugate groups consist of one or more conjugate moiety and a conjugate linker which links the conjugate moiety to the oligonucleotide. Conjugate groups may be attached to either or both ends of an oligonucleotide and/or at any internal position. In certain embodiments, conjugate groups are attached to the 2′-position of a nucleoside of a modified oligonucleotide. In certain embodiments, conjugate groups that are attached to either or both ends of an oligonucleotide are terminal groups. In certain such embodiments, conjugate groups or terminal groups are attached at the 3′ and/or 5′-end of oligonucleotides. In certain such embodiments, conjugate groups (or terminal groups) are attached at the 3′-end of oligonucleotides. In certain embodiments, conjugate groups are attached near the 3′-end of oligonucleotides. In certain embodiments, conjugate groups (or terminal groups) are attached at the 5′-end of oligonucleotides. In certain embodiments, conjugate groups are attached near the 5′-end of oligonucleotides.

[0216] Examples of terminal groups include but are not limited to conjugate groups, capping groups, phosphate moieties, protecting groups, modified or unmodified nucleosides, and two or more nucleosides that are independently modified or unmodified.

[0217] A. Certain Conjugate Groups

[0218] In certain embodiments, oligonucleotides are covalently attached to one or more conjugate groups. In certain embodiments, conjugate groups modify one or more properties of the attached oligonucleotide, including but not limited to pharmacodynamics, pharmacokinetics, stability, binding, absorption, tissue distribution, cellular distribution, cellular uptake, charge and clearance. In certain embodiments, conjugate groups impart a new property on the attached oligonucleotide, e.g., fluorophores or reporter groups that enable detection of the oligonucleotide. Certain conjugate groups and conjugate moieties have been described previously, for example: cholesterol moiety (Letsinger et al., Proc. Natl. Acad. Sci. USA, 1989, 86, 6553-6556), cholic acid (Manoharan et al., Bioorg. Med. Chem. Lett., 1994, 4, 1053-1060), a thioether, e.g., hexyl-S-tritylthiol (Manoharan et al., Ann. N.Y. Acad. Sci., 1992, 660, 306-309; Manoharan et al., Bioorg. Med. Chem. Lett., 1993, 3, 2765-2770), a thiocholesterol (Oberhauser et al., Nucl. Acids Res., 1992, 20, 533-538), an aliphatic chain, e.g., do-decan-diol or undecyl residues (Saison-Behmoaras et al., EMBO J., 1991, 10, 1111-1118; Kabanov et al., FEBS Lett., 1990, 259, 327-330; Svinarchuk et al., Biochimie, 1993, 75, 49-54), a phospholipid, e.g., di-hexadecyl-rac-glycerol or triethyl-ammonium 1,2-di-O-hexadecyl-rac-glycero-3-H-phosphonate (Manoharan et al., Tetrahedron Lett., 1995, 36, 3651-3654; Shea et al., Nucl. Acids Res., 1990, 18, 3777-3783), a polyamine or a polyethylene glycol chain (Manoharan et al., Nucleosides & Nucleotides, 1995, 14, 969-973), or adamantane acetic acid a palmityl moiety (Mishra et al., Biochim. Biophys. Acta, 1995, 1264, 229-237), an octadecylamine or hexylamino-carbonyl-oxycholesterol moiety (Crooke et al., J. Pharmacol. Exp. Ther., 1996, 277, 923-937), a tocopherol group (Nishina et al., Molecular Therapy Nucleic Acids, 2015, 4, e220; and Nishina et al., Molecular Therapy, 2008, 16, 734-740), or a GalNAc cluster (e.g., WO2014/179620).

[0219] 1. Conjugate Moieties

[0220] Conjugate moieties include, without limitation, intercalators, reporter molecules, polyamines, polyamides, peptides, carbohydrates, vitamin moieties, polyethylene glycols, thioethers, polyethers, cholesterols, thiocholesterols, cholic acid moieties, folate, lipids, phospholipids, biotin, phenazine, phenanthridine, anthraquinone, adamantane, acridine, fluoresceins, rhodamines, coumarins, fluorophores, and dyes.

[0221] In certain embodiments, a conjugate moiety comprises an active drug substance, for example, aspirin, warfarin, phenylbutazone, ibuprofen, suprofen, fen-bufen, ketoprofen, (S)-(+)-pranoprofen, carprofen, dansylsarcosine, 2,3,5-triiodobenzoic acid, fingolimod, flufenamic acid, folinic acid, a benzothiadiazide, chlorothiazide, a diazepine, indo-methicin, a barbiturate, a cephalosporin, a sulfa drug, an antidiabetic, an antibacterial or an antibiotic.

[0222] 2. Conjugate Linkers

[0223] Conjugate moieties are attached to oligonucleotides through conjugate linkers. In certain oligomeric compounds, the conjugate linker is a single chemical bond (i.e., the conjugate moiety is attached directly to an oligonucleotide through a single bond). In certain embodiments, the conjugate linker comprises a chain structure, such as a hydrocarbyl chain, or an oligomer of repeating units such as ethylene glycol, nucleosides, or amino acid units.

[0224] In certain embodiments, a conjugate linker comprises one or more groups selected from alkyl, amino, oxo, amide, disulfide, polyethylene glycol, ether, thioether, and hydroxylamino. In certain such embodiments, the conjugate linker comprises groups selected from alkyl, amino, oxo, amide and ether groups. In certain embodiments, the conjugate linker comprises groups selected from alkyl and amide groups. In certain embodiments, the conjugate linker comprises groups selected from alkyl and ether groups. In certain embodiments, the conjugate linker comprises at least one phosphorus moiety. In certain embodiments, the conjugate linker comprises at least one phosphate group. In certain embodiments, the conjugate linker includes at least one neutral linking group.

[0225] In certain embodiments, conjugate linkers, including the conjugate linkers described above, are bifunctional linking moieties, e.g., those known in the art to be useful for attaching conjugate groups to parent compounds, such as the oligonucleotides provided herein. In general, a bifunctional linking moiety comprises at least two functional groups. One of the functional groups is selected to bind to a particular site on a parent compound and the other is selected to bind to a conjugate group. Examples of functional groups used in a bifunctional linking moiety include but are not limited to electrophiles for reacting with nucleophilic groups and nucleophiles for reacting with electrophilic groups. In certain embodiments, bifunctional linking moieties comprise one or more groups selected from amino, hydroxyl, carboxylic acid, thiol, alkyl, alkenyl, and alkynyl.

[0226] Examples of conjugate linkers include but are not limited to pyrrolidine, 8-amino-3,6-dioxaoctanoic acid (ADO), succinimidyl 4-(N-maleimidomethyl)cyclohexane-1-carboxylate (SMCC) and 6-aminohexanoic acid (AHEX or AHA). Other conjugate linkers include but are not limited to substituted or unsubstituted C₁-C₁₀ alkyl, substituted or unsubstituted C₂-C₁₀ alkenyl or substituted or unsubstituted C₂-C₁₀ alkynyl, wherein a nonlimiting list of preferred substituent groups includes hydroxyl, amino, alkoxy, carboxy, benzyl, phenyl, nitro, thiol, thioalkoxy, halogen, alkyl, aryl, alkenyl and alkynyl.

[0227] In certain embodiments, conjugate linkers comprise 1-10 linker-nucleosides. In certain embodiments, conjugate linkers comprise 2-5 linker-nucleosides. In certain embodiments, conjugate linkers comprise exactly 3 linker-nucleosides. In certain embodiments, conjugate linkers comprise the TCA motif. In certain embodiments, such linker-nucleosides are modified nucleosides. In certain embodiments such linker-nucleosides comprise a modified sugar moiety. In certain embodiments, linker-nucleosides are unmodified. In certain embodiments, linker-nucleosides comprise an optionally protected heterocyclic base selected from a purine, substituted purine, pyrimidine or substituted pyrimidine. In certain embodiments, a cleavable moiety is a nucleoside selected from uracil, thymine, cytosine, 4-N-benzoylcytosine, 5-methyl cytosine, 4-N-benzoyl-5-methyl cytosine, adenine, 6-N-benzoyladenine, guanine and 2-N-isobutyrylguanine. It is typically desirable for linker-nucleosides to be cleaved from the oligomeric compound after it reaches a target tissue. Accordingly, linker-nucleosides are typically linked to one another and to the remainder of the oligomeric compound through cleavable bonds. In certain embodiments, such cleavable bonds are phosphodiester bonds.

[0228] Herein, linker-nucleosides are not considered to be part of the oligonucleotide. Accordingly, in embodiments in which an oligomeric compound comprises an oligonucleotide consisting of a specified number or range of linked nucleosides and/or a specified percent complementarity to a reference nucleic acid and the oligomeric compound also comprises a conjugate group comprising a conjugate linker comprising linker-nucleosides, those linker-nucleosides are not counted toward the length of the oligonucleotide and are not used in determining the percent complementarity of the oligonucleotide for the reference nucleic acid. For example, an oligomeric compound may comprise (1) a modified oligonucleotide consisting of 8-30 nucleosides and (2) a conjugate group comprising 1-10 linker-nucleosides that are contiguous with the nucleosides of the modified oligonucleotide. The total number of contiguous linked nucleosides in such an oligomeric compound is more than 30. Alternatively, an oligomeric compound may comprise a modified oligonucleotide consisting of 8-30 nucleosides and no conjugate group. The total number of contiguous linked nucleosides in such an oligomeric compound is no more than 30. Unless otherwise indicated conjugate linkers comprise no more than 10 linker-nucleosides. In certain embodiments, conjugate linkers comprise no more than 5 linker-nucleosides. In certain embodiments, conjugate linkers comprise no more than 3 linker-nucleosides. In certain embodiments, conjugate linkers comprise no more than 2 linker-nucleosides. In certain embodiments, conjugate linkers comprise no more than 1 linker-nucleoside.

[0229] In certain embodiments, it is desirable for a conjugate group to be cleaved from the oligonucleotide. For example, in certain circumstances oligomeric compounds comprising a particular conjugate moiety are better taken up by a particular cell type, but once the oligomeric compound has been taken up, it is desirable that the conjugate group be cleaved to release the unconjugated or parent oligonucleotide. Thus, certain conjugate linkers may comprise one or more cleavable moieties. In certain embodiments, a cleavable moiety is a cleavable bond. In certain embodiments, a cleavable moiety is a group of atoms comprising at least one cleavable bond. In certain embodiments, a cleavable moiety comprises a group of atoms having one, two, three, four, or more than four cleavable bonds. In certain embodiments, a cleavable moiety is selectively cleaved inside a cell or subcellular compartment, such as a lysosome. In certain embodiments, a cleavable moiety is selectively cleaved by endogenous enzymes, such as nucleases.

[0230] In certain embodiments, a cleavable bond is selected from among: an amide, an ester, an ether, one or both esters of a phosphodiester, a phosphate ester, a carbamate, or a disulfide. In certain embodiments, a cleavable bond is one or both of the esters of a phosphodiester. In certain embodiments, a cleavable moiety comprises a phosphate or phosphodiester. In certain embodiments, the cleavable moiety is a phosphate linkage between an oligonucleotide and a conjugate moiety or conjugate group.

[0231] In certain embodiments, a cleavable moiety comprises or consists of one or more linker-nucleosides. In certain such embodiments, the one or more linker-nucleosides are linked to one another and/or to the remainder of the oligomeric compound through cleavable bonds. In certain embodiments, such cleavable bonds are unmodified phosphodiester bonds. In certain embodiments, a cleavable moiety is 2′-deoxynucleoside that is attached to either the 3′ or 5′-terminal nucleoside of an oligonucleotide by a phosphate internucleoside linkage and covalently attached to the remainder of the conjugate linker or conjugate moiety by a phosphate or phosphorothioate linkage. In certain such embodiments, the cleavable moiety is 2′-deoxyadenosine.

[0232] B. Certain Terminal Groups

[0233] In certain embodiments, oligomeric compounds comprise one or more terminal groups. In certain such embodiments, oligomeric compounds comprise a stabilized 5′-phophate. Stabilized 5′-phosphates include, but are not limited to 5′-phosphanates, including, but not limited to 5′-vinylphosphonates. In certain embodiments, terminal groups comprise one or more abasic nucleosides and/or inverted nucleosides. In certain embodiments, terminal groups comprise one or more 2′-linked nucleosides. In certain such embodiments, the 2′-linked nucleoside is an abasic nucleoside.

[0234] III. Oligomeric Duplexes

[0235] In certain embodiments, oligomeric compounds described herein comprise an oligonucleotide, having a nucleobase sequence complementary to that of a target nucleic acid. In certain embodiments, an oligomeric compound is paired with a second oligomeric compound to form an oligomeric duplex. Such oligomeric duplexes comprise a first oligomeric compound having a region complementary to a target nucleic acid and a second oligomeric compound having a region complementary to the first oligomeric compound. In certain embodiments, the first oligomeric compound of an oligomeric duplex comprises or consists of (1) a modified or unmodified oligonucleotide and optionally a conjugate group and (2) a second modified or unmodified oligonucleotide and optionally a conjugate group. Either or both oligomeric compounds of an oligomeric duplex may comprise a conjugate group. The oligonucleotides of each oligomeric compound of an oligomeric duplex may include non-complementary overhanging nucleosides.

[0236] IV. Antisense Activity

[0237] In certain embodiments, oligomeric compounds and oligomeric duplexes are capable of hybridizing to a target nucleic acid, resulting in at least one antisense activity; such oligomeric compounds and oligomeric duplexes are antisense compounds. In certain embodiments, antisense compounds have antisense activity when they reduce or inhibit the amount or activity of a target nucleic acid by 25% or more in the standard cell assay. In certain embodiments, antisense compounds selectively affect one or more target nucleic acid. Such antisense compounds comprise a nucleobase sequence that hybridizes to one or more target nucleic acid, resulting in one or more desired antisense activity and does not hybridize to one or more non-target nucleic acid or does not hybridize to one or more non-target nucleic acid in such a way that results in significant undesired antisense activity.

[0238] In certain antisense activities, hybridization of an antisense compound to a target nucleic acid results in recruitment of a protein that cleaves the target nucleic acid. For example, certain antisense compounds result in RNase H mediated cleavage of the target nucleic acid. RNase H is a cellular endonuclease that cleaves the RNA strand of an RNA:DNA duplex. The DNA in such an RNA:DNA duplex need not be unmodified DNA. In certain embodiments, described herein are antisense compounds that are sufficiently “DNA-like” to elicit RNase H activity. In certain embodiments, one or more non-DNA-like nucleoside in the gap segment of a gapmer is tolerated.

[0239] In certain antisense activities, an antisense compound or a portion of an antisense compound is loaded into an RNA-induced silencing complex (RISC), ultimately resulting in cleavage of the target nucleic acid. For example, certain antisense compounds result in cleavage of the target nucleic acid by Argonaute. Antisense compounds that are loaded into RISC are RNAi compounds. RNAi compounds may be double-stranded (siRNA) or single-stranded (ssRNA).

[0240] In certain embodiments, hybridization of an antisense compound to a target nucleic acid does not result in recruitment of a protein that cleaves that target nucleic acid. In certain embodiments, hybridization of the antisense compound to the target nucleic acid results in alteration of splicing of the target nucleic acid. In certain embodiments, hybridization of an antisense compound to a target nucleic acid results in inhibition of a binding interaction between the target nucleic acid and a protein or other nucleic acid. In certain embodiments, hybridization of an antisense compound to a target nucleic acid results in alteration of translation of the target nucleic acid.

[0241] Antisense activities may be observed directly or indirectly. In certain embodiments, observation or detection of an antisense activity involves observation or detection of a change in an amount of a target nucleic acid or protein encoded by such target nucleic acid, a change in the ratio of splice variants of a nucleic acid or protein and/or a phenotypic change in a cell or subject.

[0242] V. Certain Target Nucleic Acids

[0243] In certain embodiments, oligomeric compounds comprise or consist of an oligonucleotide comprising a region that is complementary to a target nucleic acid. In certain embodiments, the target nucleic acid is an endogenous RNA molecule. In certain embodiments, the target nucleic acid encodes a protein. In certain such embodiments, the target nucleic acid is selected from: a mature mRNA and a pre-mRNA, including intronic, exonic and untranslated regions. In certain embodiments, the target RNA is a mature mRNA. In certain embodiments, the target nucleic acid is a pre-mRNA. In certain such embodiments, the target region is entirely within an intron. In certain embodiments, the target region spans an intron/exon junction. In certain embodiments, the target region is at least 50% within an intron. In certain embodiments, the target nucleic acid is the RNA transcriptional product of a retrogene. In certain embodiments, the target nucleic acid is a non-coding RNA. In certain such embodiments, the target non-coding RNA is selected from: a long non-coding RNA, a short non-coding RNA, an intronic RNA molecule.

[0244] A. Complementarity/Mismatches to the Target Nucleic Acid

[0245] It is possible to introduce mismatch bases without eliminating activity. For example, Gautschi et al (J. Natl. Cancer Inst. 93:463-471, March 2001) demonstrated the ability of an oligonucleotide having 100% complementarity to the bcl-2 mRNA and having 3 mismatches to the bcl-xL mRNA to reduce the expression of both bcl-2 and bcl-xL in vitro and in vivo. Furthermore, this oligonucleotide demonstrated potent anti-tumor activity in vivo. Maher and Dolnick (Nuc. Acid. Res. 16:3341-3358, 1988) tested a series of tandem 14 nucleobase oligonucleotides, and a 28 and 42 nucleobase oligonucleotides comprised of the sequence of two or three of the tandem oligonucleotides, respectively, for their ability to arrest translation of human DHFR in a rabbit reticulocyte assay. Each of the three 14 nucleobase oligonucleotides alone was able to inhibit translation, albeit at a more modest level than the 28 or 42 nucleobase oligonucleotides.

[0246] In certain embodiments, oligonucleotides are complementary to the target nucleic acid over the entire length of the oligonucleotide. In certain embodiments, oligonucleotides are 99%, 95%, 90%, 85%, or 80% complementary to the target nucleic acid. In certain embodiments, oligonucleotides are at least 80% complementary to the target nucleic acid over the entire length of the oligonucleotide and comprise a region that is 100% or fully complementary to a target nucleic acid. In certain embodiments, the region of full complementarity is from 6 to 20, 10 to 18, or 18 to 20 nucleobases in length.

[0247] In certain embodiments, oligonucleotides comprise one or more mismatched nucleobases relative to the target nucleic acid. In certain embodiments, antisense activity against the target is reduced by such mismatch, but activity against a non-target is reduced by a greater amount. Thus, in certain embodiments selectivity of the oligonucleotide is improved. In certain embodiments, the mismatch is specifically positioned within an oligonucleotide having a gapmer motif. In certain embodiments, the mismatch is at position 1, 2, 3, 4, 5, 6, 7, or 8 from the 5′-end of the gap segment. In certain embodiments, the mismatch is at position 9, 8, 7, 6, 5, 4, 3, 2, 1 from the 3′-end of the gap segment. In certain embodiments, the mismatch is at position 1, 2, 3, or 4 from the 5′-end of the wing region. In certain embodiments, the mismatch is at position 4, 3, 2, or 1 from the 3′-end of the wing region.

[0248] B. NLRP3

[0249] In certain embodiments, oligomeric compounds comprise or consist of an oligonucleotide comprising a region that is complementary to a NLRP3 nucleic acid. In certain embodiments, the NLRP3 nucleic acid has the sequence set forth in SEQ ID NO: 1 (GENBANK Accession No. NC_000001.11, truncated from nucleosides 247413001 to 247454000), to SEQ ID NO: 2 (GENBANK Accession No. NM_004895.4), to SEQ ID NO: 3 (GENBANK Accession No. NM_183395.2), to SEQ ID NO: 4 (GENBANK Accession No. NM_001127461.2), to SEQ ID NO: 5 (GENBANK Accession No. NM_001079821.2).

[0250] In certain embodiments an oligomeric compound complementary to any one of SEQ ID NOs: 1-5 is capable of reducing an NLRP3 RNA in a cell. In certain embodiments an oligomeric compound complementary to any one of SEQ ID NOs: 1-5 is capable of reducing an NLRP3 protein in a cell. In certain embodiments, the cell is in vitro. In certain embodiments, the cell is in a subject. In certain embodiments, the oligomeric compound consists of a modified oligonucleotide.

[0251] In certain embodiments, an oligomeric compound complementary to any one of SEQ ID NOs: 1-5 is capable of ameliorating one or more symptoms of a kidney injury or kidney disease when it is administered to an individual in need thereof. In certain embodiments, the one or more symptoms are selected from nausea, vomiting, loss of appetite, reduced urine output, elevated serum creatinine levels, muscle cramping, swelling, itching, chest pain, shortness of breath and elevated blood pressure, or a combination thereof. In certain embodiments, the kidney injury or kidney disease is selected from acute kidney injury (AKI) and chronic kidney disease (CKD).

[0252] In certain embodiments, an oligomeric compound complementary to any one of SEQ ID NOs: 1-5 is capable of ameliorating one or more symptoms of a cardiac disorder or cardiac injury when it is administered to an individual in need thereof. In certain embodiments, the one or more symptoms are selected from pain, heart palpitations (e.g., irregular tempo, fast heartbeat, forceful heartbeat, or fluttering), chest pain, fatigue, shortness of breath, weakness, lightheadedness, dizziness, fainting episode(s), nausea, confusion, intolerance to exertion, blood clots, or a combination thereof. In certain embodiments, the cardiac disorder or cardiac injury is heart failure, hyperkalemia, a cardiomyopathy, or a cardiac arrhythmia. The cardiac disorder may be associated with, or arise from, a cardiac injury. For example, the arrhythmia may be an MI-associated cardiac arrhythmia. The cardiomyopathy may be RBM20 cardiomyopathy. The cardiomyopathy may be associated with diabetes, long QT syndrome 2 (LQT2), catecholaminergic polymorphic ventricular tachycardia (CPVT), administration of doxorubicin, or acute beta-adrenergic stress.

[0253] The subject may have a cardiac disorder or cardiac injury. The cardiac disorder or cardiac injury may be heart failure, hypokalemia, a cardiomyopathy, or a cardiac arrhythmia. The cardiomyopathy may be, for example, hypertrophic cardiomyopathy, dilated cardiomyopathy, restrictive cardiomyopathy, arrhythmogenic right ventricular dysplasia, or Takotsubo cardiomyopathy (broken heart syndrome). The cardiomyopathy may be dilated cardiomyopathy. In certain embodiments, dilated cardiomyopathy is arrhythmogenic. In certain embodiments, dilated cardiomyopathy is genetic, in which the subject has a mutation in one or more of TTN, LMNA, RBM20, SCN5A, MYH7, TNNT2, and TPM1. The cardiomyopathy may be RBM20 cardiomyopathy. Cardiac arrhythmias may include, but are not limited to, atrial or ventricular arrhythmia, for example, atrial fibrillation (AF), ventricular fibrillation, or ventricular tachycardia (VT). The cardiac injury may be myocardial infarction (MI). The cardiac disorder may be an MI-associated arrhythmia, for example, MI-associated ventricular arrhythmia. Symptoms of cardiac disorders and cardiac injuries include, but are not limited to, pain, heart palpitations (e.g., irregular tempo, fast heartbeat, forceful heartbeat, or fluttering), chest pain, fatigue, shortness of breath, weakness, lightheadedness, dizziness, fainting episode(s), nausea, confusion, intolerance to exertion, and/or blood clots. In some embodiments, the materials and methods provided herein improve one or more indices of heart function. Indices of heart function include cardiovascular death, cardiac dilation, cardiac fibrosis, low voltage ECG, diastolic calcium uptake, ejection fraction (EF), left ventricular ejection fraction (LVEF), left ventricular end systolic volume (LVESV), left ventricular end diastolic volume (LVEDV), mitral valve flow profile, left ventricle (LV) strain, left ventricle (LV) strain rate, infarct size, heart failure hospitalization, 6 minute walk test (6MWT), the Kansas City Cardiomyopathy Questionnaire Score (KCCQS), heart rate, and heart rhythm in the subject. In certain embodiments, the compounds, methods, and pharmaceutical compositions are useful in reducing a progression of heart failure. Progression of heart failure may be classified according to a method known in the art or as provided herein.

[0254] Heart failure may be classified according to the New York Heart Association classification. The New York Heart Association classifies heart failure in four categories. In Class I heart failure, no symptoms are observed. In Class II heart failure, everyday activities can be performed without difficulty but a subject may experience dyspnea (shortness of breath), palpitation, or feel fatigued upon exertion. In Class III, completing everyday activities is difficult, and a subject may experience marked limitation of physical activity due to fatigue, palpitation, or dyspnea. and in Class IV, the most severe, a subject is unable to carry on any physical activity without discomfort, and the subject is short of breath even at rest.

[0255] Heart failure may be classified according to the American College of Cardiology/American Heart Association guidelines. In Class A, while a subject may have risk factors for heart failure, no objective evidence of cardiovascular disease is observed, and no limitation in ordinary physical activity is noted. In Class B, there is observed objective evidence of a minimal (structural) cardiovascular condition, including mild symptoms and slight limitation during ordinary activity, but the subject is comfortable at rest. In Class C, there is observed objective evidence of a moderately severe (structural) cardiovascular condition, including marked limitation in activity due to symptoms, even during less-than-ordinary activity, and the subject is comfortable only at rest. In Class D, there is observed objective evidence of a severe (structural) cardiovascular condition, and severe limitations, and the subject experiences symptoms even while at rest. Some specific structural cardiac conditions include mitral valve regurgitation or stenosis, aortic stenosis, coarctation of the aorta (mild to severe narrowing in the aorta), ventricular septal defects.

[0256] Examples of diseases associated with NLRP3 treatable with the oligomeric agents, oligomeric compounds, modified oligonucleotides, oligomeric duplexes, and methods provided herein include heart failure, hypokalemia, a cardiomyopathy, or a cardiac arrhythmia. In certain embodiments, cardiomyopathy is dilated cardiomyopathy. In certain embodiments, dilated cardiomyopathy is genetic, including TTN, LMNA, RBM20, SCN5A, MYH7, TNNT2, and TPM1 mutations. In certain embodiments, dilated cardiomyopathy is arrhythmogenic. In certain embodiments, cardiac arrhythmias is atrial fibrillation (AF), ventricular fibrillation, or ventricular tachycardia (VT). Further embodiment provide for improving an index of heart function selected from cardiovascular death, cardiac dilation, cardiac fibrosis, low voltage ECG, diastolic calcium uptake, ejection fraction (EF), left ventricular ejection fraction (LVEF), left ventricular end systolic volume (LVESV), left ventricular end diastolic volume (LVEDV), mitral valve flow profile, left ventricle (LV) strain, left ventricle (LV) strain rate, infarct size, heart failure hospitalization, 6 minute walk test (6MWT), the Kansas City Cardiomyopathy Questionnaire Score (KCCQS), heart rate, and heart rhythm associated with heart failure, hypokalemia, a cardiomyopathy, or a cardiac arrhythmia.

[0257] Examples of conditions associated with NLRP3 treatable with the oligomeric agents, oligomeric compounds, modified oligonucleotides, oligomeric duplexes, and methods provided herein include a kidney injury or kidney disease, or a symptom thereof. In certain embodiments, the symptom is selected from nausea, vomiting, loss of appetite, reduced urine output, elevated serum creatinine levels, muscle cramping, swelling, itching, chest pain, shortness of breath and elevated blood pressure, or a combination thereof. In certain embodiments, the kidney injury or kidney disease is selected from acute kidney injury (AKI) and chronic kidney disease (CKD).

[0258] In certain embodiments, an oligomeric agent, oligomeric compound, modified oligonucleotide, or oligomeric duplex is for the manufacture or preparation of a medicament for treating or ameliorating a condition described herein.

[0259] In certain embodiments, an oligomeric compound complementary to any one of SEQ ID NOs: 1-5 is capable of reducing a detectable amount of an NLRP3 RNA in the plasma/serum, blood, kidney, liver or heart of a subject when the oligomeric compound is administered to the subject. In some instances, the oligomeric compound is administered subcutaneously. The detectable amount of the NLRP3 RNA may be reduced by at least 10%, at least 20%, at least 30%, at least 40%, at least 50%, at least 60%, at least 70%, at least 80%, or at least 90%. In certain embodiments, an oligomeric compound complementary to any one of SEQ ID NOs: 1-5 is capable of reducing a detectable amount of an NLRP3 protein in the plasma/serum blood, kidney, liver or heart of the subject when the oligomeric compound is administered to the subject. The detectable amount of the NLRP3 protein may be reduced by at least 10%, at least 20%, at least 30%, at least 40%, at least 50%, at least 60%, at least 70%, at least 80%, or at least 90%.

[0260] VI. Certain Hotspot Regions

[0261] In certain embodiments, the ranges described in Table 1 below comprise hotspot regions. Each hotspot region begins with the nucleobase of SEQ ID NO: 1 identified in the “Start Site SEQ ID NO: 1” column and ends with the nucleobase of SEQ ID NO: 1 identified in the “Stop Site SEQ ID NO: 1” column. In certain embodiments, oligomeric compounds comprise modified oligonucleotides that are complementary within any of the hotspot regions 1-11, as defined in Table 1 below. In certain embodiments, modified oligonucleotides are 16 nucleobases in length. In certain embodiments, modified oligonucleotides are 17 nucleobases in length. In certain embodiments, modified oligonucleotides are 18 nucleobases in length. In certain embodiments, modified oligonucleotides are 19 nucleobases in length. In certain embodiments, modified oligonucleotides are 20 nucleobases in length.

[0262] The nucleobase sequences of the compounds listed in the second to last column of Table 1 are complementary to SEQ ID NO: 1 within the specified hotspot regions defined by the provided Start Sites of SEQ ID NO: 1 (column 2) and Stop Sites of SEQ ID NO: 1 (column 3). The nucleobase sequences of these compounds are provided in the last column (“SEQ ID NOs in range”) in the same order as the compounds.

[0263] In certain embodiments, modified oligonucleotides complementary to nucleobases within the hotspot region achieve at least minimum % reduction, relative to untreated control cells, of NLRP3 RNA in vitro in the standard cell assay, (“Min.% Red. In vitro”), as indicated in Table 1. In certain embodiments, modified oligonucleotides complementary to nucleobases within the hotspot region achieve a maximum % reduction, relative to untreated control cells, of NLRP3 RNA in vitro in the standard cell assay, (“Max. % Red. In vitro”) as indicated in Table 1. In certain embodiments, modified oligonucleotides complementary to nucleobases within the hotspot region achieve an average % reduction, relative to untreated control cells, of NLRP3 RNA in vitro in the standard cell assay, (“Avg % Red. In vitro”) as indicated in Table 1.

TABLE 1
NLRP3 Hotspot Regions

| | Start Site | Stop Site | Min % | Max % | Avg % | |
|---|---|---|---|---|---|---|
| Hotspot | SEQ ID | SEQ ID | Red. In | Red. In | Red. In | |
| ID | NO: 1 | NO: 1 | vitro | vitro | vitro | Compound NOs in range |
| 1 | 12138 | 12155 | 41 | 78 | 61.9 | 1232844, 1232845, 1232846, |
| | | | | | | 1299765, 1299769, 1299773, |
| | | | | | | 1300531, 1300535, 1300539, |
| | | | | | | 1300983, 1300984, 1300987, |
| | | | | | | 1304716, 1304770, 1304822 |
| 2 | 14478 | 14523 | 21 | 88 | 71.9 | 1233082, 1233083, 1242439, |
| | | | | | | 1242440, 1242441, 1242442, |
| | | | | | | 1242443, 1242444, 1242445, |
| | | | | | | 1242446, 1242447, 1242448, |
| | | | | | | 1242449, 1242450, 1242451, |
| | | | | | | 1242452, 1242453, 1242454, |
| | | | | | | 1242455, 1242456, 1242457, |
| | | | | | | 1242458, 1242459, 1242460, |
| | | | | | | 1299631, 1299855, 1299865, |
| | | | | | | 1299877, 1300395, 1300623, |
| | | | | | | 1300635, 1300641, 1300850, |
| | | | | | | 1301074, 1301092, 1301098, |
| | | | | | | 1301199, 1304701, 1304704, |
| | | | | | | 1304707, 1304721, 1304723, |
| | | | | | | 1304735, 1304745, 1304763, |
| | | | | | | 1304766, 1304774, 1304803, |
| | | | | | | 1304812, 1304829 |
| 3 | 14578 | 14622 | 34 | 94 | 68.9 | 1242480, 1242481, 1242482, |
| | | | | | | 1242483, 1242484, 1242485, |
| | | | | | | 1242486, 1242487, 1242488, |
| | | | | | | 1242489, 1242490, 1242491, |
| | | | | | | 1242492, 1242493, 1242494, |
| | | | | | | 1242495, 1242496, 1242497, |
| | | | | | | 1242498, 1299635, 1299643, |
| | | | | | | 1300405, 1300406, 1300858, |
| | | | | | | 1300859, 1304689, 1304690, |
| | | | | | | 1304696, 1304711, 1304731, |
| | | | | | | 1304737, 1304746, 1304758, |
| | | | | | | 1304794, 1304798 |
| 4 | 14667 | 14693 | 43 | 93 | 75.8 | 1242499, 1242500, 1242501, |
| | | | | | | 1242502, 1242503, 1242504, |
| | | | | | | 1242505, 1242506, 1304698, |
| | | | | | | 1304709, 1304714, 1304728, |
| | | | | | | 1304739 |
| 5 | 15111 | 15130 | 61 | 90 | 77.1 | 1242516, 1242517, 1242518, |
| | | | | | | 1299656, 1299657, 1299659, |
| | | | | | | 1300421, 1300422, 1300424, |
| | | | | | | 1300874, 1300875, 1300876, |
| | | | | | | 1304724, 1304751 |
| 6 | 15182 | 15200 | 62 | 97 | 76.9 | 1242519, 1299658, 1299666, |
| | | | | | | 1299673, 1300431, 1300438, |
| | | | | | | 1300440, 1300883, 1300889, |
| | | | | | | 1300892, 1301213, 1304730 |
| 7 | 17668 | 17686 | 34 | 87 | 67.3 | 1233103, 1233104, 1242546, |
| | | | | | | 1242547, 1299676, 1299681, |
| | | | | | | 1299683, 1299684, 1300441, |
| | | | | | | 1300447, 1300449, 1300450, |
| | | | | | | 1300897, 1300898, 1300899, |
| | | | | | | 1300901, 1304749, 1304783, |
| | | | | | | 1304807 |
| 8 | 20272 | 20291 | 31 | 89 | 68.1 | 1242601, 1299796, 1299797, |
| | | | | | | 1299805, 1299809, 1299812, |
| | | | | | | 1300572, 1300575, 1300576, |
| | | | | | | 1300578, 1300580, 1301015, |
| | | | | | | 1301024, 1301026, 1301029, |
| | | | | | | 1301030, 1301277, 1301281, |
| | | | | | | 1301283, 1304702 |
| 9 | 20634 | 20657 | 51 | 89 | 69.7 | 1242626, 1242627, 1242628, |
| | | | | | | 1242629, 1242630, 1242631, |
| | | | | | | 1242632, 1304685, 1304686, |
| | | | | | | 1304699, 1304733 |
| 10 | 23475 | 23512 | 12 | 89 | 64.7 | 1233172, 1233173, 1233174, |
| | | | | | | 1233175, 1233176, 1233176, |
| | | | | | | 1233177, 1242724, 1299705, |
| | | | | | | 1299708, 1299709, 1299711, |
| | | | | | | 1299713, 1299715, 1299724, |
| | | | | | | 1300472, 1300474, 1300477, |
| | | | | | | 1300480, 1300481, 1300485, |
| | | | | | | 1300489, 1300924, 1300925, |
| | | | | | | 1300926, 1300929, 1300935, |
| | | | | | | 1300940, 1300941, 1301225, |
| | | | | | | 1301228, 1304712, 1304778, |
| | | | | | | 1304781, 1304821 |
| 11 | 25026 | 25049 | 47 | 84 | 70.1 | 1242821, 1242822, 1299857, |
| | | | | | | 1299858, 1300636, 1300640, |
| | | | | | | 1301075, 1301085, 1301314, |
| | | | | | | 1304688 |

[0264] VII. Certain Compounds

[0265] 1. Compound No. 1233279

[0266] In certain embodiments, the oligomeric compound is Compound No. 1233279. In certain embodiments, Compound No. 1233279 is characterized as an oligomeric compound consisting of a modified oligonucleotide, wherein the modified oligonucleotide is a 3-10-3 cEt gapmer, having a sequence of (from 5′ to 3′) AACTATTAAGCAACGG (SEQ ID NO: 628), wherein each of nucleosides 1-3 (from 5′ to 3′) comprise a cEt modified sugar moiety, each of nucleosides 14-16 (from 5′ to 3′) comprise a cEt modified sugar moiety, and each of nucleosides 4-13 are 2′-deoxynucleosides, wherein the internucleoside linkages between all nucleosides are phosphorothioate linkages, and wherein each cytosine is a 5-methyl cytosine.

[0267] In certain embodiments, Compound 1233279 is characterized by the following chemical notation: AₖₛAₖₛ^{m} CₖₛT_{ds}A_{ds}T_{ds}T_{ds}A_{ds}A_{ds}G_{ds}^{m}C_{ds}A_{ds}A_{ds}^{m}CₖₛGₖₛGₖ (SEQ ID NO: 628); wherein
[0268] A=an adenine nucleobase,
[0269] mC=a 5-methyl cytosine nucleobase,
[0270] G=a guanine nucleobase,
[0271] T=a thymine nucleobase,
[0272] k=a cEt modified sugar moiety,
[0273] d=a 2′-β-D-deoxyribosyl sugar moiety, and
[0274] s=a phosphorothioate internucleoside linkage.

[0275] In certain embodiments, Compound No. 1233279 is represented by the following chemical structure:

[chemical structure]

or a salt thereof. In certain embodiments, Compound No. 1233279 is in the form of an anion or a salt thereof. For example, the oligomeric compound may be in the form of a sodium salt. In certain embodiments, the oligomeric compound is in anionic form in a solution. In certain embodiments, Compound No. 1233279 is a sodium salt or a potassium salt.

[0276] In certain embodiments, Compound No. 1233279 is represented by the following chemical structure:

[chemical structure]

[0277] 2. Compound No. 1242547

[0278] In certain embodiments, the oligomeric compound is Compound No. 1242547. In certain embodiments, Compound No. 1242547 is characterized as an oligomeric compound consisting of a modified oligonucleotide, wherein the modified oligonucleotide is a 3-10-3 cEt gapmer, having a sequence of (from 5′ to 3′) TGGAATATATCGAGCA (SEQ ID NO: 1454), wherein each of nucleosides 1-3 (from 5′ to 3′) comprise a cEt modified sugar moiety, each of nucleosides 14-16 (from 5′ to 3′) comprise a cEt modified sugar moiety, and each of nucleosides 4-13 are 2′-deoxynucleosides, wherein the internucleoside linkages between all nucleosides are phosphorothioate linkages, and wherein each cytosine is a 5-methyl cytosine.

[0279] In certain embodiments, Compound 1242547 is characterized by the following chemical notation: TₖₛGₖₛGₖₛA_{ds}A_{ds}T_{ds}A_{ds}T_{ds}A_{ds}T_{ds}^{m}C_{ds}G_{ds}A_{ds}Gₖₛ^{m}CₖₛAₖ (SEQ ID NO: 1454); wherein
[0280] A=an adenine nucleobase,
[0281] mC=a 5-methyl cytosine nucleobase,
[0282] G=a guanine nucleobase,
[0283] T=a thymine nucleobase,
[0284] k=a cEt modified sugar moiety,
[0285] d=a 2′-β-D-deoxyribosyl sugar moiety, and
[0286] s=a phosphorothioate internucleoside linkage.

[0287] In certain embodiments, Compound No. 1242547 is represented by the following chemical structure:

[chemical structure]

or a salt thereof. In certain embodiments, Compound No. 1242547 is in the form of an anion or a salt thereof. For example, the oligomeric compound may be in the form of a sodium salt. In certain embodiments, the oligomeric compound is in anionic form in a solution. In certain embodiments, Compound No. 1242547 is a sodium salt or a potassium salt.

[0288] In certain embodiments, Compound No. 1242547 is represented by the following chemical structure:

[chemical structure]

[0289] 3. Compound No. 1299773

[0290] In certain embodiments, the oligomeric compound is Compound No. 1299773. In certain embodiments, Compound No. 1299773 is characterized as an oligomeric compound consisting of a modified oligonucleotide, wherein the modified oligonucleotide is a 3-9-4 MOE/cEt gapmer, having a sequence of (from 5′ to 3′) CCTTTTCGAATTTGCC (SEQ ID NO: 420), wherein each of nucleosides 1, 3, 15 and 16 (from 5′ to 3′) comprise a cEt modified sugar moiety, each of nucleosides 2, 13 and 14 (from 5′ to 3′) comprise a 2′-MOE modified sugar moiety, and each of nucleosides 4-12 are 2′-deoxynucleosides, wherein the internucleoside linkages between all nucleosides are phosphorothioate linkages, and wherein each cytosine is a 5-methyl cytosine.

[0291] In certain embodiments, Compound 1299773 is characterized by the following chemical notation: ^{m}Cₖₛ^{m}CₑₛTₖₛTₐₛTₐₛTₐₛ^{m}C_{ds}GₐₛA_{ds}A_{ds}TₐₛTₐₛTₑₛGₑₛ^{m}Cₖₛ^{m}Cₖ (SEQ ID NO: 420); wherein
[0292] A=an adenine nucleobase,
[0293] mC=a 5-methyl cytosine nucleobase,
[0294] G=a guanine nucleobase,
[0295] T=a thymine nucleobase,
[0296] k=a cEt modified sugar moiety,
[0297] e=a 2′-MOE β-D-ribosyl sugar moiety,
[0298] d=a 2′-β-D-deoxyribosyl sugar moiety, and
[0299] s=a phosphorothioate internucleoside linkage.

[0300] In certain embodiments, Compound No. 1299773 is represented by the following chemical structure:

[chemical structure]

[0301] In certain embodiments, Compound No. 1299773 is in the form of an anion or a salt thereof. For example, the oligomeric compound may be in the form of a sodium salt. In certain embodiments, the oligomeric compound is in anionic form in a solution. In certain embodiments, Compound No. 1299773 is a sodium salt or a potassium salt.

[0302] In certain embodiments, Compound No. 1299773 is represented by the following chemical structure:

[chemical structure]

[0303] VIII. Certain Pharmaceutical Compositions & Delivery Systems

[0304] In certain embodiments, described herein are pharmaceutical compositions comprising one or more oligomeric compounds. In certain embodiments, the one or more oligomeric compounds each consists of a modified oligonucleotide. In certain embodiments, the pharmaceutical composition comprises a pharmaceutically acceptable diluent or carrier. In certain embodiments, a pharmaceutical composition comprises or consists of a sterile saline solution and one or more oligomeric compound. In certain embodiments, the sterile saline is pharmaceutical grade saline. In certain embodiments, a pharmaceutical composition comprises or consists of one or more oligomeric compound and sterile water. In certain embodiments, the sterile water is pharmaceutical grade water. In certain embodiments, a pharmaceutical composition comprises or consists of one or more oligomeric compound and phosphate-buffered saline (PBS). In certain embodiments, the sterile PBS is pharmaceutical grade PBS. In certain embodiments, a pharmaceutical composition comprises or consists of one or more oligomeric compound and artificial cerebrospinal fluid. In certain embodiments, the artificial cerebrospinal fluid is pharmaceutical grade.

[0305] In certain embodiments, pharmaceutical compositions comprise one or more oligomeric compound and one or more excipients. In certain embodiments, excipients are selected from water, salt solutions, alcohol, polyethylene glycols, gelatin, lactose, amylase, magnesium stearate, talc, silicic acid, viscous paraffin, hydroxymethylcellulose and polyvinylpyrrolidone.

[0306] In certain embodiments, oligomeric compounds may be admixed with pharmaceutically acceptable active and/or inert substances for the preparation of pharmaceutical compositions or formulations. Compositions and methods for the formulation of pharmaceutical compositions depend on a number of criteria, including, but not limited to, route of administration, extent of disease, or dose to be administered.

[0307] In certain embodiments, pharmaceutical compositions comprising an oligomeric compound encompass any pharmaceutically acceptable salts of the oligomeric compound, esters of the oligomeric compound, or salts of such esters. In certain embodiments, pharmaceutical compositions comprising oligomeric compounds comprising one or more oligonucleotide, upon administration to a subject, including a human, are capable of providing (directly or indirectly) the biologically active metabolite or residue thereof. Accordingly, for example, the disclosure is also drawn to pharmaceutically acceptable salts of oligomeric compounds, prodrugs, pharmaceutically acceptable salts of such prodrugs, and other bioequivalents. Suitable pharmaceutically acceptable salts include, but are not limited to, sodium and potassium salts. In certain embodiments, prodrugs comprise one or more conjugate group attached to an oligonucleotide, wherein the conjugate group is cleaved by endogenous nucleases within the body.

[0308] Lipid moieties have been used in nucleic acid therapies in a variety of methods. In certain such methods, the nucleic acid, such as an oligomeric compound, is introduced into preformed liposomes or lipoplexes made of mixtures of cationic lipids and neutral lipids. In certain methods, DNA complexes with mono- or poly-cationic lipids are formed without the presence of a neutral lipid. In certain embodiments, a lipid moiety is selected to increase distribution of a pharmaceutical agent to a particular cell or tissue. In certain embodiments, a lipid moiety is selected to increase distribution of a pharmaceutical agent to fat tissue. In certain embodiments, a lipid moiety is selected to increase distribution of a pharmaceutical agent to muscle tissue.

[0309] In certain embodiments, pharmaceutical compositions comprise a delivery system. Examples of delivery systems include, but are not limited to, liposomes and emulsions. Certain delivery systems are useful for preparing certain pharmaceutical compositions including those comprising hydrophobic compounds. In certain embodiments, certain organic solvents such as dimethylsulfoxide are used.

[0310] In certain embodiments, pharmaceutical compositions comprise one or more tissue-specific delivery molecules designed to deliver the one or more pharmaceutical agents of the present invention to specific tissues or cell types. For example, in certain embodiments, pharmaceutical compositions include liposomes coated with a tissue-specific antibody.

[0311] In certain embodiments, pharmaceutical compositions comprise a co-solvent system. Certain of such co-solvent systems comprise, for example, benzyl alcohol, a nonpolar surfactant, a water-miscible organic polymer, and an aqueous phase. In certain embodiments, such co-solvent systems are used for hydrophobic compounds. A non-limiting example of such a co-solvent system is the VPD co-solvent system, which is a solution of absolute ethanol comprising 3% w/v benzyl alcohol, 8% w/v of the nonpolar surfactant Polysorbate 80™ and 65% w/v polyethylene glycol 300. The proportions of such co-solvent systems may be varied considerably without significantly altering their solubility and toxicity characteristics. Furthermore, the identity of co-solvent components may be varied: for example, other surfactants may be used instead of Polysorbate 80™; the fraction size of polyethylene glycol may be varied; other biocompatible polymers may replace polyethylene glycol, e.g., polyvinyl pyrrolidone; and other sugars or polysaccharides may substitute for dextrose.

[0312] In certain embodiments, pharmaceutical compositions are prepared for oral administration. In certain embodiments, pharmaceutical compositions are prepared for buccal administration. In certain embodiments, a pharmaceutical composition is prepared for administration by injection (e.g., intravenous, subcutaneous, intramuscular, intrathecal (IT), intracerebroventricular (ICV), etc.). In certain of such embodiments, a pharmaceutical composition comprises a carrier and is formulated in aqueous solution, such as water or physiologically compatible buffers such as Hanks's solution, Ringer's solution, or physiological saline buffer. In certain embodiments, other ingredients are included (e.g., ingredients that aid in solubility or serve as preservatives). In certain embodiments, injectable suspensions are prepared using appropriate liquid carriers, suspending agents and the like. Certain pharmaceutical compositions for injection are presented in unit dosage form, e.g., in ampoules or in multi-dose containers. Certain pharmaceutical compositions for injection are suspensions, solutions or emulsions in oily or aqueous vehicles, and may contain formulatory agents such as suspending, stabilizing and/or dispersing agents. Certain solvents suitable for use in pharmaceutical compositions for injection include, but are not limited to, lipophilic solvents and fatty oils, such as sesame oil, synthetic fatty acid esters, such as ethyl oleate or triglycerides, and liposomes.

[0313] Certain embodiments provide pharmaceutical compositions suitable for aerosolization and/or dispersal by a nebulizer or inhaler. In certain embodiments, the pharmaceutical composition is a solid comprising particles of compounds that are of respirable size. A solid particulate composition can optionally contain a dispersant which serves to facilitate the formation of an aerosol, e.g., lactose. Solid pharmaceutical compositions comprising an oligonucleotide can also be aerosolized using any solid particulate medicament aerosol generator known in the art, e.g., a dry powder inhaler. In certain embodiments, the powder employed in the inhaler consists of the compound comprising the active compound or of a powder blend comprising the active compound, a suitable powder diluent, and an optional surfactant. In certain embodiments, the pharmaceutical composition is a liquid. In certain such embodiments, the liquid is administered as an aerosol that is produced by any suitable means, such as with a nebulizer or inhaler. See, e.g., U.S. Pat. No. 4,501,729. In certain embodiments, the nebulizer is a device for producing a spray of liquid. Nebulizers are devices that transform solutions or suspensions into an aerosol mist and are well known in the art. Suitable nebulizers include jet nebulizers, ultrasonic nebulizers, electronic mesh nebulizers, and vibrating mesh nebulizers. In certain embodiments, the nebulizer is activated manually by squeezing a flexible bottle that contains the pharmaceutical composition. In certain embodiments, the aerosol is produced by a metered dose inhaler, which typically contains a suspension or solution formulation of the active compound in a liquefied propellant. Pharmaceutical compositions suitable for aerosolization can comprise propellants, surfactants, co-solvents, dispersants, preservatives, and/or other additives or excipients.

[0314] A compound described herein complementary to an NLRP3 nucleic acid can be utilized in pharmaceutical compositions by combining the compound with a suitable pharmaceutically acceptable diluent or carrier and/or additional components such that the pharmaceutical composition is suitable for aerosolization by a nebulizer or inhaler. In certain embodiments, a pharmaceutically acceptable diluent is phosphate buffered saline. Accordingly, in one embodiment, employed in the methods described herein is a pharmaceutical composition comprising a compound complementary to an NLRP3 nucleic acid and a pharmaceutically acceptable diluent. In certain embodiments, the pharmaceutically acceptable diluent is phosphate buffered saline. In certain embodiments, the compound comprises or consists of a modified oligonucleotide provided herein.

[0315] Pharmaceutical compositions comprising compounds provided herein encompass any pharmaceutically acceptable salts, esters, or salts of such esters, or any other oligonucleotide which, upon administration to an animal, including a human, is capable of providing (directly or indirectly) the biologically active metabolite or residue thereof. In certain embodiments, the compounds are antisense compounds or oligomeric compounds. In certain embodiments, the compound comprises or consists of a modified oligonucleotide. Accordingly, for example, the disclosure is also drawn to pharmaceutically acceptable salts of compounds, prodrugs, pharmaceutically acceptable salts of such prodrugs, and other bioequivalents. Suitable pharmaceutically acceptable salts include, but are not limited to, sodium and potassium salts. A prodrug can include the incorporation of additional nucleosides at one or both ends of a compound which are cleaved by endogenous nucleases within the body, to form the active compound.

[0316] Under certain conditions, certain compounds disclosed herein are shown in the form of a free acid. Although such compounds may be drawn or described in protonated (free acid) form, aqueous solutions of such compounds may exist in equilibrium among an ionized (anion) form, and in association with a cation (salt form). For example, a phosphate linkage of an oligonucleotide in aqueous solution exists in equilibrium among free acid, anion, and salt forms. Unless otherwise indicated, compounds described herein are intended to include all such forms. Moreover, oligonucleotides have several such linkages, each of which is in equilibrium. Thus, oligonucleotides in solution exist in an ensemble of forms at multiple positions, all at equilibrium. The term “oligonucleotide” is intended to include all such forms. Drawn structures necessarily depict a single form. Nevertheless, unless otherwise indicated, such drawings are likewise intended to include corresponding forms. Herein, a structure depicting the free acid of a compound followed by the term “or salts thereof” expressly includes all such forms that may be fully or partially protonated/de-protonated/in association with a cation. In certain instances, one or more specific cation is identified.

[0317] In certain embodiments, oligomeric compounds disclosed herein are in a form of a sodium salt. In certain embodiments, oligomeric compounds disclosed herein are in a form of a potassium salt. In certain embodiments, oligomeric compounds disclosed herein are in aqueous solution with sodium. In certain embodiments, oligomeric compounds are in aqueous solution with potassium. In certain embodiments, oligomeric compounds are in PBS. In certain embodiments, oligomeric compounds are in water. In certain such embodiments, the pH of the solution is adjusted with NaOH and/or HCl to achieve a desired pH.

### Nonlimiting Disclosure and Incorporation by Reference

[0318] Each of the literature and patent publications listed herein is incorporated by reference in its entirety.

[0319] While certain compounds, compositions and methods described herein have been described with specificity in accordance with certain embodiments, the following examples serve only to illustrate the compounds described herein and are not intended to limit the same. Each of the references, GenBank accession numbers, and the like recited in the present application is incorporated herein by reference in its entirety.

[0320] Although the sequence listing accompanying this filing identifies each sequence as either “RNA” or “DNA” as required, in reality, those sequences may be modified with any combination of chemical modifications. One of skill in the art will readily appreciate that such designation as “RNA” or “DNA” to describe modified oligonucleotides is, in certain instances, arbitrary. For example, an oligonucleotide comprising a nucleoside comprising a 2′-OH sugar moiety and a thymine base could be described as a DNA having a modified sugar (2′-OH in place of one 2′-H of DNA) or as an RNA having a modified base (thymine (methylated uracil) in place of a uracil of RNA). Accordingly, nucleic acid sequences provided herein, including, but not limited to those in the sequence listing, are intended to encompass nucleic acids containing any combination of natural or modified RNA and/or DNA, including, but not limited to such nucleic acids having modified nucleobases. By way of further example and without limitation, an oligomeric compound having the nucleobase sequence “ATCGATCG” encompasses any oligomeric compounds having such nucleobase sequence, whether modified or unmodified, including, but not limited to, such compounds comprising RNA bases, such as those having sequence “AUCGAUCG” and those having some DNA bases and some RNA bases such as “AUCGATCG” and oligomeric compounds having other modified nucleobases, such as “AT^{m}CGAUCG,” wherein mC indicates a cytosine base comprising a methyl group at the 5-position.

[0321] Certain compounds described herein (e.g., modified oligonucleotides) have one or more asymmetric center and thus give rise to enantiomers, diastereomers, and other stereoisomeric configurations that may be defined, in terms of absolute stereochemistry, as (R) or (S), as a or 13 such as for sugar anomers, or as (D) or (L), such as for amino acids, etc. Compounds provided herein that are drawn or described as having certain stereoisomeric configurations include only the indicated compounds. Compounds provided herein that are drawn or described with undefined stereochemistry include all such possible isomers, including their stereorandom and optically pure forms, unless specified otherwise. Likewise, tautomeric forms of the compounds herein are also included unless otherwise indicated. Unless otherwise indicated, compounds described herein are intended to include corresponding salt forms.

[0322] The compounds described herein include variations in which one or more atoms are replaced with a non-radioactive isotope or radioactive isotope of the indicated element. For example, compounds herein that comprise hydrogen atoms encompass all possible deuterium substitutions for each of the ¹H hydrogen atoms. Isotopic substitutions encompassed by the compounds herein include but are not limited to: ²H or ³H in place of ¹H, ¹³C or ¹⁴C in place of ¹²C, ¹⁵N in place of ¹⁴N, ¹⁷O or ¹⁸O in place of ¹⁶O, and ³³S, ³⁴S, ³⁵S, or ³⁶S in place of ³²S. In certain embodiments, non-radioactive isotopic substitutions may impart new properties on the oligomeric compound that are beneficial for use as a therapeutic or research tool. In certain embodiments, radioactive isotopic substitutions may make the compound suitable for research or diagnostic purposes such as imaging.

### EXAMPLES

[0323] The following examples illustrate certain embodiments of the present disclosure and are not limiting. Moreover, where specific embodiments are provided, the inventors have contemplated generic application of those specific embodiments. For example, disclosure of an oligonucleotide having a particular motif provides reasonable support for additional oligonucleotides having the same or similar motif. And, for example, where a particular high-affinity modification appears at a particular position, other high-affinity modifications at the same position are considered suitable, unless otherwise indicated.

### Example 1: Effect of 3-10-3 cEt Uniform Phosphorothioate Modified Oligonucleotides on Human NLRP3 RNA In Vitro, Single Dose

[0324] Modified oligonucleotides complementary to human NLRP3 nucleic acid were designed and tested for their single dose effects on NLRP3 RNA in vitro. The modified oligonucleotides were tested in a series of experiments that had the same culture conditions.

[0325] The modified oligonucleotides in the tables below are 3-10-3 cEt modified oligonucleotides with uniform phosphorothioate internucleoside linkages. The modified oligonucleotides are 16 nucleosides in length, wherein the central gap segment consists of ten 2′-O-D-deoxynucleosides, and wherein the 5′ and 3′ wing segments each consist of three cEt modified nucleosides. The sugar motif for the modified oligonucleotides is (from 5′ to 3′): kkkddddddddddkkk; wherein each “d” represents a 2′-β-D-deoxyribosyl sugar moiety, and each “k” represents a cEt sugar moiety. The internucleoside linkage motif for the modified oligonucleotides is (from 5′ to 3′): sssssssssssssss; wherein each “s” represents a phosphorothioate internucleoside linkage. Each cytosine residue is a 5-methyl cytosine.

[0326] “Start site” indicates the 5′-most nucleoside to which the modified oligonucleotide is complementary in the target nucleic acid sequence. “Stop site” indicates the 3′-most nucleoside to which the modified oligonucleotide is complementary in the target nucleic acid sequence. Each modified oligonucleotide listed in the tables below is 100% complementary to SEQ ID NO: 1 (GENBANK Accession No. NC_000001.11, truncated from nucleosides 247413001 to 247454000), to SEQ ID NO: 2 (GENBANK Accession No. NM_004895.4), to SEQ ID NO: 3 (GENBANK Accession No. NM_183395.2), to SEQ ID NO: 4 (GENBANK Accession No. NM_001127461.2), to SEQ ID NO: 5 (GENBANK Accession No. NM_001079821.2), or to any combination of these SEQ ID NOs. “N/A” indicates that the modified oligonucleotide is not 100% complementary to that particular target nucleic acid sequence.

[0327] Cultured THP-1 cells were treated with modified oligonucleotide at a concentration of 2000 nM by electroporation at a density of 300,000 cells per well. After a treatment period of approximately 24 hours, total RNA was isolated from the cells and NLRP3 RNA levels were measured by quantitative real-time RTPCR. NLRP3 RNA levels were measured by human primer-probe set RTS37509 (forward sequence GATGTTCTGTGAAGTGCTGAAAC, designated herein as SEQ ID NO: 10; reverse sequence AGCTCAGGCTTTTCTTCTTGA, designated herein as SEQ ID NO: 11; probe sequence ACCCCAGGTTCTGCAGGAGG, designated herein as SEQ ID NO: 12). NLRP3 RNA levels were normalized to total RNA content, as measured by RIBOGREEN®. Reduction of NLRP3 RNA is presented in the tables below as percent NLRP3 RNA relative to the amount of NLRP3 RNA in untreated control cells (% UTC). The values marked with a “T” indicate that the modified oligonucleotide is complementary to the amplicon region of the primer probe set. Additional assays may be used to measure the potency and efficacy of the modified oligonucleotides complementary to the amplicon region. “N.D.” in the tables below refers to instances where the value was Not Defined.

[0328] Each separate experimental analysis described in this example is identified by a letter ID in the table column below labeled “AID” (Analysis ID).

[0329] Compound No. 1232737 was used as a benchmark on multiple plates, and has a sugar motif of (from 5′ to 3′): kkkddddddddddkkk; wherein each “d” represents a 2′-β-D-deoxyribosyl sugar moiety, and each “k” represents a cEt sugar moiety, and an internucleoside linkage motif of (from 5′ to 3′): sssssssssssssss; wherein each “s” represents a phosphorothioate internucleoside linkage. Each cytosine residue of Compound No. 1232737 is a 5-methyl cytosine.

TABLE 2
Reduction of NLRP3 RNA by 3-10-3 cEt modified oligonucleotides with uniform
phosphorothioate internucleoside linkages at a concentration of 2000 nM in THP-1 cells

| | SEQ | SEQ | SEQ | SEQ | | | | |
|---|---|---|---|---|---|---|---|---|
| | ID | ID | ID | ID | | | | |
| | No: 1 | No: 1 | No: 2 | No: 2 | | NLRP3 | | |
| Compound | Start | Stop | Start | Stop | | (% | | SEQ ID |
| Number | Site | Site | Site | Site | Sequence (5′ to 3′) | UTC) | AID | NO |
| 1232727 | 5089 | 5104 | 41 | 56 | GGCTATGACATTGGAC | 69 | A | 20 |
| 1232735 | 5133 | 5148 | 85 | 100 | ATCTTGACCCATCAGC | 46 | A | 21 |
| 1232737 | 5138 | 5153 | 90 | 105 | ATGCCATCTTGACCCA | 58 | A | 22 |
| 1232744 | 5159 | 5174 | 111 | 126 | ACGGTGAACAACCACT | 43 | A | 23 |
| 1232752 | 5168 | 5183 | 120 | 135 | TTACAGTTTACGGTGA | 72 | A | 24 |
| 1232760 | 5254 | 5269 | 206 | 221 | CGATCCAGGAGTGTGT | 68 | A | 25 |
| 1232768 | 5597 | 5612 | 549 | 564 | AAGTTAGCCAAGGCCG | 86 | A | 26 |
| 1232776 | 5760 | 5775 | 712 | 727 | CCTTAGGCTTCGGTCC | 54 | A | 27 |
| 1232784 | 5969 | 5984 | 921 | 936 | CCCCATTGAAGTCGAT | 77 | A | 28 |
| 1232792 | 6012 | 6027 | 964 | 979 | ATCGCAGCGAAGATCC | 45 | A | 29 |
| 1232800 | 10250 | 10265 | 1050 | 1065 | TCACAGTGGGATTCGA | 83 | A | 30 |
| 1232808 | 10309 | 10324 | 1109 | 1124 | TCTCGAAAGGTACTCC | 54 | A | 31 |
| 1232816 | 10953 | 10968 | 1256 | 1271 | CTTGATGAGACGCAGT | 51 | A | 32 |
| 1232824 | 11365 | 11380 | 1668 | 1683 | CGTCAAAGGCACCTTG | 55 | A | 33 |
| 1232832 | 11952 | 11967 | 2255 | 2270 | GAACAGGTTCATCCTC | 52 | A | 34 |
| 1232840 | 12115 | 12130 | 2418 | 2433 | CCAGAAGGACTGTCAC | 83 | A | 35 |
| 1232848 | 12145 | 12160 | 2448 | 2463 | AATACCCCTTTTCGAA | 65 | A | 36 |
| 1232856 | 12380 | 12395 | 2683 | 2698 | GGGAAATAGTCCATGG | 48 | A | 37 |
| 1232864 | 12540 | 12555 | 2843 | 2858 | CACCATATCAAGGTGT | 95 | A | 38 |
| 1232872 | 16618 | 16633 | 2936 | 2951 | TGAAAAGAGGCCCCGG | 56 | A | 39 |
| 1232880 | 16734 | 16749 | 3052 | 3067 | CTCCGAATGTTACAGC | 56 | A | 40 |
| 1232888 | 21115 | 21130 | 3086 | 3101 | CTCATGCGAGAGGCCA | 57 | A | 41 |
| 1232896 | 21138 | 21153 | 3109 | 3124 | ACCAAGGAGATGTCGA | 65 | A | 42 |
| 1232904 | 21207 | 21222 | 3178 | 3193 | CTGATTCCGAAGTCAC | 58 | A | 43 |
| 1232912 | 23078 | 23093 | 3353 | 3368 | AATTGCGACTCCTGAG | 58 | A | 44 |
| 1232920 | 23086 | 23101 | 3361 | 3376 | TCACATAAAATTGCGA | 63 | A | 45 |
| 1232928 | 31047 | 31062 | 3491 | 3506 | TCGCAGGTAAAGGTGC | 70 | A | 46 |
| 1232936 | 35436 | 35451 | 3789 | 3804 | TTTCTAACGCACTTTT | 35† | A | 47 |
| 1232944 | 35476 | 35491 | 3829 | 3844 | TCAAAGACGACGGTCA | 91† | A | 48 |
| 1232952 | 35532 | 35547 | 3885 | 3900 | AGGGACCGGAGAACAC | 93 | A | 49 |
| 1232960 | 35672 | 35687 | 4025 | 4040 | CGTAAAGGAGATGCCC | 70 | A | 50 |
| 1232968 | 35877 | 35892 | 4230 | 4245 | AATGATGATATGAGCA | 81 | A | 51 |
| 1232976 | 35888 | 35903 | 4241 | 4256 | AAGATAGCGGGAATGA | 85 | A | 52 |
| 1232984 | 3623 | 3638 | N/A | N/A | CGCATACCCTCCCAGC | 78 | A | 53 |
| | 3686 | 3701 | | | | | | |
| 1232992 | 3632 | 3647 | N/A | N/A | TATTAGCTCCGCATAC | 108 | A | 54 |
| | 3695 | 3710 | | | | | | |
| 1233000 | 3868 | 3883 | N/A | N/A | AAACGGTGGAGCTCTC | 89 | A | 55 |
| 1233008 | 4423 | 4438 | N/A | N/A | CAAAATTCGCAATTGT | 68 | A | 56 |
| 1233016 | 6625 | 6640 | N/A | N/A | AGTAGTAAGATTCACA | 44 | A | 57 |
| 1233024 | 7936 | 7951 | N/A | N/A | CAAAACATGTGGTCTG | 83 | A | 58 |
| 1233032 | 8651 | 8666 | N/A | N/A | TAAACCATGGGCCAGT | 63 | A | 59 |
| 1233040 | 9523 | 9538 | N/A | N/A | ATCCAAACAGTCACTA | 81 | A | 60 |
| 1233048 | 10165 | 10180 | N/A | N/A | ATGCAATTGAAACCTG | 90 | A | 61 |
| 1233056 | 10742 | 10757 | N/A | N/A | GTAACCGGAATGGAGA | 90 | A | 62 |
| 1233064 | 12708 | 12723 | N/A | N/A | GCATTATGATGTAGCT | 68 | A | 63 |
| 1233072 | 13046 | 13061 | N/A | N/A | TCCTTAAAGGAGGCTT | 54 | A | 64 |
| 1233080 | 14379 | 14394 | N/A | N/A | CTCTTAATGAGTAGTT | 71 | A | 65 |
| 1233088 | 15873 | 15888 | N/A | N/A | AAATCGCAAGCCCAGG | 68 | A | 66 |
| 1233096 | 17442 | 17457 | N/A | N/A | TAACATTAGGTCTTGT | 59 | A | 67 |
| 1233104 | 17669 | 17684 | N/A | N/A | GAATATATCGAGCATC | 30 | A | 68 |
| 1233112 | 18559 | 18574 | N/A | N/A | CAAACGCAAACCCCAT | 62 | A | 69 |
| 1233120 | 18739 | 18754 | N/A | N/A | GCACAATCGAATCAGA | 50 | A | 70 |
| 1233128 | 19002 | 19017 | N/A | N/A | AACTACTCGAAGAATT | 79 | A | 71 |
| 1233136 | 19798 | 19813 | N/A | N/A | CTATACTTTATCCCTG | 69 | A | 72 |
| 1233144 | 20583 | 20598 | N/A | N/A | GACCAGAGAGCTCCGG | 27 | A | 73 |
| | 20709 | 20724 | | | | | | |
| | 20751 | 20766 | | | | | | |
| | 20919 | 20934 | | | | | | |
| 1233152 | 20702 | 20717 | N/A | N/A | GAGCTCCGGAATAGAG | 90 | A | 74 |
| | 20744 | 20759 | | | | | | |
| | 20912 | 20927 | | | | | | |
| 1233160 | 22485 | 22500 | N/A | N/A | TCCTATAAGGACAATC | 76 | A | 75 |
| 1233168 | 23303 | 23318 | N/A | N/A | ATCTTATTAGCAGCAG | 23 | A | 76 |
| 1233176 | 23496 | 23511 | N/A | N/A | CCTAGTGTAGAGGCTG | 20 | A | 77 |
| | 23529 | 23544 | | | | | | |
| 1233184 | 23823 | 23838 | N/A | N/A | CATGATTATTAGTGGG | 66 | A | 78 |
| 1233192 | 24163 | 24178 | N/A | N/A | AAAGCTAAATTGGAGG | 53 | A | 79 |
| 1233200 | 24528 | 24543 | N/A | N/A | TTCTAAGGCGATTTGC | 59 | A | 80 |
| 1233208 | 25161 | 25176 | N/A | N/A | GACCTATAAGGACCCA | 29 | A | 81 |
| 1233216 | 26174 | 26189 | N/A | N/A | AATCACATAGGTCTTC | 82 | A | 82 |
| 1233224 | 26690 | 26705 | N/A | N/A | TTTCAATAGATAGGGT | 73 | A | 83 |
| 1233232 | 26940 | 26955 | N/A | N/A | ATAGATACCTATCTCA | 66 | A | 84 |
| 1233240 | 26973 | 26988 | N/A | N/A | ATGCATAAAAGTCTCG | N.D. | A | 85 |
| 1233248 | 27030 | 27045 | N/A | N/A | AACCCATAGGCTATAC | 57 | A | 86 |
| | 27066 | 27081 | | | | | | |
| 1233256 | 27364 | 27379 | N/A | N/A | ATTTAGGACCGTCCCC | 86 | A | 87 |
| 1233264 | 27772 | 27787 | N/A | N/A | AACTAATTCATAGCTG | 105 | A | 88 |
| 1233272 | 28687 | 28702 | N/A | N/A | AATCCTTGGATTAGAG | 61 | A | 89 |
| 1233280 | 28761 | 28776 | N/A | N/A | TAACTATTAAGCAACG | 73 | A | 90 |
| 1233288 | 29361 | 29376 | N/A | N/A | CAGGAATAGCGCAGGT | 87 | A | 91 |
| 1233296 | 31299 | 31314 | N/A | N/A | ATCTATATCATCTGGA | 70 | A | 92 |
| 1233304 | 31903 | 31918 | N/A | N/A | TGCAAATGAAGCGAGA | 71 | A | 93 |
| 1233312 | 32126 | 32141 | N/A | N/A | CCATAGACGAGTTCTA | 63 | A | 94 |
| 1233320 | 33802 | 33817 | N/A | N/A | TCATTAATATGGACAG | 53 | A | 95 |
| 1233328 | 34216 | 34231 | N/A | N/A | AGGAAGAGGACTCTCG | 57 | A | 96 |
| 1233336 | 34417 | 34432 | N/A | N/A | CCCTAATGTACGGTAC | 62 | A | 97 |
| 1232728 | 5104 | 5119 | 56 | 71 | TCCCGTTGATTACGGG | 109 | B | 98 |
| 1232736 | 5135 | 5150 | 87 | 102 | CCATCTTGACCCATCA | 47 | B | 99 |
| 1232737 | 5138 | 5153 | 90 | 105 | ATGCCATCTTGACCCA | 61 | B | 22 |
| 1232745 | 5160 | 5175 | 112 | 127 | TACGGTGAACAACCAC | 41 | B | 100 |
| 1232753 | 5170 | 5185 | 122 | 137 | TATTACAGTTTACGGT | 57 | B | 101 |
| 1232761 | 5256 | 5271 | 208 | 223 | CTCGATCCAGGAGTGT | 66 | B | 102 |
| 1232769 | 5714 | 5729 | 666 | 681 | CACGGATGAGTCTTTT | 63 | B | 103 |
| 1232777 | 5762 | 5777 | 714 | 729 | GTCCTTAGGCTTCGGT | 62 | B | 104 |
| 1232785 | 6000 | 6015 | 952 | 967 | ATCCACACGGCCATGG | 65 | B | 105 |
| 1232793 | 6013 | 6028 | 965 | 980 | GATCGCAGCGAAGATC | 94 | B | 106 |
| 1232801 | 10256 | 10271 | 1056 | 1071 | GGCATATCACAGTGGG | 53 | B | 107 |
| 1232809 | 10311 | 10326 | 1111 | 1126 | ATTCTCGAAAGGTACT | 77 | B | 108 |
| 1232817 | 11039 | 11054 | 1342 | 1357 | TTAATGGGACTCACGG | 46 | B | 109 |
| 1232825 | 11427 | 11442 | 1730 | 1745 | GCTCAGGAGAATGTCT | 86 | B | 110 |
| 1232833 | 12032 | 12047 | 2335 | 2350 | AGGTAGTACATGGCGG | 49 | B | 111 |
| 1232841 | 12132 | 12147 | 2435 | 2450 | GAATTTGCCATAGTTT | 39 | B | 112 |
| 1232849 | 12203 | 12218 | 2506 | 2521 | AAGTAGGAGGTCCTCT | 58 | B | 113 |
| 1232857 | 12400 | 12415 | 2703 | 2718 | AGAGATTGATCTCAAT | 78 | B | 114 |
| 1232865 | 16607 | 16622 | 2925 | 2940 | CCCGGCAAAAACTGGA | 100 | B | 115 |
| 1232873 | 16619 | 16634 | 2937 | 2952 | CTGAAAAGAGGCCCCG | 49 | B | 116 |
| 1232881 | 16735 | 16750 | 3053 | 3068 | TCTCCGAATGTTACAG | 66 | B | 117 |
| 1232889 | 21116 | 21131 | 3087 | 3102 | ACTCATGCGAGAGGCC | 76 | B | 118 |
| 1232897 | 21139 | 21154 | 3110 | 3125 | GACCAAGGAGATGTCG | 80 | B | 119 |
| 1232905 | 21240 | 21255 | 3211 | 3226 | CACAACAGGTGCTTCA | 77 | B | 120 |
| 1232913 | 23079 | 23094 | 3354 | 3369 | AAATTGCGACTCCTGA | 56 | B | 121 |
| 1232921 | 30973 | 30988 | 3417 | 3432 | GGCCAGAATTCACCAA | 71 | B | 122 |
| 1232929 | 31062 | 31077 | 3506 | 3521 | TCCGAGAGTGTTGCCT | 43 | B | 123 |
| 1232937 | 35437 | 35452 | 3790 | 3805 | GTTTCTAACGCACTTT | 16† | B | 124 |
| 1232945 | 35477 | 35492 | 3830 | 3845 | CTCAAAGACGACGGTC | 94 | B | 125 |
| 1232953 | 35536 | 35551 | 3889 | 3904 | CTGGAGGGACCGGAGA | 108 | B | 126 |
| 1232961 | 35712 | 35727 | 4065 | 4080 | ACCCGATGCTGTCATT | 70 | B | 127 |
| 1232969 | 35878 | 35893 | 4231 | 4246 | GAATGATGATATGAGC | 76 | B | 128 |
| 1232977 | 35889 | 35904 | 4242 | 4257 | AAAGATAGCGGGAATG | 99 | B | 129 |
| 1232985 | 3624 | 3639 | N/A | N/A | CCGCATACCCTCCCAG | 71 | B | 130 |
| | 3687 | 3702 | | | | | | |
| 1232993 | 3633 | 3648 | N/A | N/A | CTATTAGCTCCGCATA | 74 | B | 131 |
| | 3696 | 3711 | | | | | | |
| 1233001 | 3869 | 3884 | N/A | N/A | AAAACGGTGGAGCTCT | 80 | B | 132 |
| 1233009 | 6446 | 6461 | N/A | N/A | TTATTACGGCCGGGCG | 65 | B | 133 |
| 1233017 | 6626 | 6641 | N/A | N/A | GAGTAGTAAGATTCAC | 49 | B | 134 |
| 1233025 | 8120 | 8135 | N/A | N/A | AAAGAACCTTATCCCC | 90 | B | 135 |
| 1233033 | 8733 | 8748 | N/A | N/A | AAAGACGGTGTAGTGG | 42 | B | 136 |
| 1233041 | 9576 | 9591 | N/A | N/A | CATACTAAAAGCTCCC | 89 | B | 137 |
| 1233049 | 10180 | 10195 | N/A | N/A | CTATTATCACAGAGGA | 101 | B | 138 |
| 1233057 | 10743 | 10758 | N/A | N/A | GGTAACCGGAATGGAG | 79 | B | 139 |
| 1233065 | 12756 | 12771 | N/A | N/A | CCATACATCAATCTTT | 63 | B | 140 |
| 1233073 | 13928 | 13943 | N/A | N/A | GTAGAAACCGTACCCT | 69 | B | 141 |
| 1233081 | 14415 | 14430 | N/A | N/A | CATAAGGTCTCCCTGC | 72 | B | 142 |
| 1233089 | 15874 | 15889 | N/A | N/A | AAAATCGCAAGCCCAG | 81 | B | 143 |
| 1233097 | 17445 | 17460 | N/A | N/A | GATTAACATTAGGTCT | 52 | B | 144 |
| 1233105 | 17672 | 17687 | N/A | N/A | ATGGAATATATCGAGC | 29 | B | 145 |
| 1233113 | 18560 | 18575 | N/A | N/A | ACAAACGCAAACCCCA | 65 | B | 146 |
| 1233121 | 18751 | 18766 | N/A | N/A | AGCCACCGAACAGCAC | 50 | B | 147 |
| 1233129 | 19302 | 19317 | N/A | N/A | ACAAAGGGTAACATCC | 44 | B | 148 |
| 1233137 | 19800 | 19815 | N/A | N/A | AACTATACTTTATCCC | 96 | B | 149 |
| 1233145 | 20584 | 20599 | N/A | N/A | TGACCAGAGAGCTCCG | 43 | B | 150 |
| | 20710 | 20725 | | | | | | |
| | 20752 | 20767 | | | | | | |
| | 20920 | 20935 | | | | | | |
| 1233153 | 21596 | 21611 | N/A | N/A | AATATGAGGACCCAGG | 35 | B | 151 |
| 1233161 | 22667 | 22682 | N/A | N/A | ATTAATGGCCTTAAGC | 89 | B | 152 |
| 1233169 | 23347 | 23362 | N/A | N/A | ACACTAAGAAACTCTA | 67 | B | 153 |
| 1233177 | 23497 | 23512 | N/A | N/A | TCCTAGTGTAGAGGCT | 19 | B | 154 |
| | 23530 | 23545 | | | | | | |
| 1233185 | 23926 | 23941 | N/A | N/A | CCCTATAGCATCTTTC | 60 | B | 155 |
| 1233193 | 24272 | 24287 | N/A | N/A | AATGAAGACCTATCCA | 83 | B | 156 |
| 1233201 | 24531 | 24546 | N/A | N/A | ATATTCTAAGGCGATT | 59 | B | 157 |
| 1233209 | 25188 | 25203 | N/A | N/A | AAAGTAAGGACTGGGA | 71 | B | 158 |
| 1233217 | 26324 | 26339 | N/A | N/A | ATCTTAATCTCACACT | 56 | B | 159 |
| 1233225 | 26778 | 26793 | N/A | N/A | CGATAGATCTACACAA | 70 | B | 160 |
| 1233233 | 26941 | 26956 | N/A | N/A | TATAGATACCTATCTC | 75 | B | 161 |
| 1233241 | 27022 | 27037 | N/A | N/A | GGCTATACCTAACACA | 25 | B | 162 |
| | 27058 | 27073 | | | | | | |
| | 27112 | 27127 | | | | | | |
| 1233249 | 27031 | 27046 | N/A | N/A | TAACCCATAGGCTATA | 78 | B | 163 |
| | 27067 | 27082 | | | | | | |
| 1233257 | 27365 | 27380 | N/A | N/A | CATTTAGGACCGTCCC | 85 | B | 164 |
| 1233265 | 28559 | 28574 | N/A | N/A | TTATTAACTACCTGCC | 81 | B | 165 |
| 1233273 | 28709 | 28724 | N/A | N/A | AAACAACCATGTCCCA | 71 | B | 166 |
| 1233281 | 28824 | 28839 | N/A | N/A | AAATTGCAACAGACGG | 55 | B | 167 |
| 1233289 | 29461 | 29476 | N/A | N/A | GTCAAATTAAGCCCAT | 31 | B | 168 |
| 1233297 | 31515 | 31530 | N/A | N/A | ACTAACTAGCTTCAAG | 100 | B | 169 |
| 1233305 | 31921 | 31936 | N/A | N/A | AACCTAATCTTGAGTG | 96 | B | 170 |
| 1233313 | 32139 | 32154 | N/A | N/A | CAATTTGGATGACCCA | 46 | B | 171 |
| 1233321 | 33804 | 33819 | N/A | N/A | GATCATTAATATGGAC | 75 | B | 172 |
| 1233329 | 34319 | 34334 | N/A | N/A | CAGGAGAGATATCAGA | 72 | B | 173 |
| 1233337 | 34420 | 34435 | N/A | N/A | AACCCCTAATGTACGG | 65 | B | 174 |
| 1232729 | 5111 | 5126 | 63 | 78 | ATTTTTGTCCCGTTGA | 82 | C | 175 |
| 1232737 | 5138 | 5153 | 90 | 105 | ATGCCATCTTGACCCA | 62 | C | 22 |
| 1232738 | 5142 | 5157 | 94 | 109 | CACGATGCCATCTTGA | 51 | C | 176 |
| 1232746 | 5161 | 5176 | 113 | 128 | TTACGGTGAACAACCA | 57 | C | 177 |
| 1232754 | 5171 | 5186 | 123 | 138 | GTATTACAGTTTACGG | 41 | C | 178 |
| 1232762 | 5279 | 5294 | 231 | 246 | TTACCAGAAAGTTCTC | 54 | C | 179 |
| 1232770 | 5715 | 5730 | 667 | 682 | ACACGGATGAGTCTTT | 65 | C | 180 |
| 1232778 | 5805 | 5820 | 757 | 772 | TTGCAGCGGGTGCTTG | 79 | C | 181 |
| 1232786 | 6006 | 6021 | 958 | 973 | GCGAAGATCCACACGG | 47 | C | 182 |
| 1232794 | 6032 | 6047 | 984 | 999 | CATAAAGGTCTCTCCT | 81 | C | 183 |
| 1232802 | 10294 | 10309 | 1094 | 1109 | CAGTAAACCCATCCAC | 65 | C | 184 |
| 1232810 | 10312 | 10327 | 1112 | 1127 | GATTCTCGAAAGGTAC | 63 | C | 185 |
| 1232818 | 11040 | 11055 | 1343 | 1358 | CTTAATGGGACTCACG | 51 | C | 186 |
| 1232826 | 11527 | 11542 | 1830 | 1845 | GCCGAGGATGGTCCAG | 61 | C | 187 |
| 1232834 | 12080 | 12095 | 2383 | 2398 | AAACGACTCCCTGGAA | 80 | C | 188 |
| 1232842 | 12135 | 12150 | 2438 | 2453 | TTCGAATTTGCCATAG | 44 | C | 189 |
| 1232850 | 12204 | 12219 | 2507 | 2522 | CAAGTAGGAGGTCCTC | 51 | C | 190 |
| 1232858 | 12404 | 12419 | 2707 | 2722 | GTGGAGAGATTGATCT | 53 | C | 191 |
| 1232866 | 16608 | 16623 | 2926 | 2941 | CCCCGGCAAAAACTGG | 71 | C | 192 |
| 1232874 | 16651 | 16666 | 2969 | 2984 | CAATTCAGTTAGACTC | 63 | C | 193 |
| 1232882 | 16736 | 16751 | 3054 | 3069 | ATCTCCGAATGTTACA | 61 | C | 194 |
| 1232890 | 21126 | 21141 | 3097 | 3112 | TCGAAGCAGCACTCAT | 94 | C | 195 |
| 1232898 | 21201 | 21216 | 3172 | 3187 | CCGAAGTCACCGAGGG | 66 | C | 196 |
| 1232906 | 21250 | 21265 | 3221 | 3236 | CTTCAGATTGCACAAC | 91 | C | 197 |
| 1232914 | 23080 | 23095 | 3355 | 3370 | AAAATTGCGACTCCTG | 48 | C | 198 |
| 1232922 | 30978 | 30993 | 3422 | 3437 | CGTAAGGCCAGAATTC | 87 | C | 199 |
| 1232930 | 31063 | 31078 | 3507 | 3522 | CTCCGAGAGTGTTGCC | 66 | C | 200 |
| 1232938 | 35470 | 35485 | 3823 | 3838 | ACGACGGTCAGCTCAG | 85† | C | 201 |
| 1232946 | 35478 | 35493 | 3831 | 3846 | GCTCAAAGACGACGGT | 83 | C | 202 |
| 1232954 | 35571 | 35586 | 3924 | 3939 | ATGGATCGCAGCTCTC | 54 | C | 203 |
| 1232962 | 35713 | 35728 | 4066 | 4081 | CACCCGATGCTGTCAT | 69 | C | 204 |
| 1232970 | 35881 | 35896 | 4234 | 4249 | CGGGAATGATGATATG | 94 | C | 205 |
| 1232978 | 35890 | 35905 | 4243 | 4258 | GAAAGATAGCGGGAAT | 101 | C | 206 |
| 1232986 | 3626 | 3641 | N/A | N/A | CTCCGCATACCCTCCC | 86 | C | 207 |
| | 3689 | 3704 | | | | | | |
| 1232994 | 3634 | 3649 | N/A | N/A | CCTATTAGCTCCGCAT | 80 | C | 208 |
| | 3697 | 3712 | | | | | | |
| 1233002 | 3872 | 3887 | N/A | N/A | TGGAAAACGGTGGAGC | 79 | C | 209 |
| 1233010 | 6447 | 6462 | N/A | N/A | ATTATTACGGCCGGGC | 78 | C | 210 |
| 1233018 | 6718 | 6733 | N/A | N/A | ACATAGTTGAACCCGG | 60 | C | 211 |
| 1233026 | 8478 | 8493 | N/A | N/A | TATAAGTACTGACACA | 73 | C | 212 |
| 1233034 | 8734 | 8749 | N/A | N/A | CAAAGACGGTGTAGTG | 59 | C | 213 |
| 1233042 | 9735 | 9750 | N/A | N/A | CAAGAGTGAGAACGAC | 33 | C | 214 |
| 1233050 | 10431 | 10446 | N/A | N/A | ACCTATAGTATGGCCA | 65 | C | 215 |
| 1233058 | 10754 | 10769 | N/A | N/A | CGGAAGCGAGTGGTAA | 95 | C | 216 |
| 1233066 | 12758 | 12773 | N/A | N/A | TACCATACATCAATCT | 85 | C | 217 |
| 1233074 | 13933 | 13948 | N/A | N/A | CTGCCGTAGAAACCGT | 60 | C | 218 |
| 1233082 | 14498 | 14513 | N/A | N/A | TGCTATCTAGAGAAAT | 79 | C | 219 |
| | 14644 | 14659 | | | | | | |
| | 14717 | 14732 | | | | | | |
| | 14790 | 14805 | | | | | | |
| | 14936 | 14951 | | | | | | |
| | 15009 | 15024 | | | | | | |
| | 15082 | 15097 | | | | | | |
| 1233090 | 15875 | 15890 | N/A | N/A | GAAAATCGCAAGCCCA | 68 | C | 220 |
| 1233098 | 17450 | 17465 | N/A | N/A | GACTAGATTAACATTA | 65 | C | 221 |
| 1233106 | 17673 | 17688 | V/A | N/A | AATGGAATATATCGAG | 41 | C | 222 |
| 1233114 | 18561 | 18576 | N/A | N/A | AACAAACGCAAACCCC | 74 | C | 223 |
| 1233122 | 18757 | 18772 | N/A | N/A | CATTTAAGCCACCGAA | 77 | C | 224 |
| 1233130 | 19497 | 19512 | N/A | N/A | ACGATTTGAAATTTAC | 72 | C | 225 |
| 1233138 | 20485 | 20500 | N/A | N/A | CCGTAAACAGTGCCGG | 96 | C | 226 |
| 1233146 | 20593 | 20608 | N/A | N/A | GAATACACCTGACCAG | 69 | C | 227 |
| 1233154 | 21599 | 21614 | N/A | N/A | TACAATATGAGGACCC | 32 | C | 228 |
| 1233162 | 22790 | 22805 | N/A | N/A | AACAAGTAAGCATTCT | 68 | C | 229 |
| 1233170 | 23472 | 23487 | N/A | N/A | ATGCGATAACTTGCAT | 110 | C | 230 |
| 1233178 | 23597 | 23612 | N/A | N/A | CTACATAGGTGAAGGT | 68 | C | 231 |
| 1233186 | 23927 | 23942 | N/A | N/A | ACCCTATAGCATCTTT | 93 | C | 232 |
| 1233194 | 24363 | 24378 | N/A | N/A | GATTAGTGGATTACTC | 87 | C | 233 |
| 1233202 | 24532 | 24547 | N/A | N/A | AATATTCTAAGGCGAT | 73 | C | 234 |
| 1233210 | 25194 | 25209 | N/A | N/A | TCAACTAAAGTAAGGA | 65 | C | 235 |
| 1233218 | 26517 | 26532 | N/A | N/A | GAAACTTGGGACATGG | 71 | C | 236 |
| 1233226 | 26780 | 26795 | N/A | N/A | ATCGATAGATCTACAC | 55 | C | 237 |
| 1233234 | 26943 | 26958 | N/A | N/A | CTTATAGATACCTATC | 78 | C | 238 |
| 1233242 | 27024 | 27039 | N/A | N/A | TAGGCTATACCTAACA | 39 | C | 239 |
| | 27060 | 27075 | | | | | | |
| | 27096 | 27111 | | | | | | |
| | 27114 | 27129 | | | | | | |
| 1233250 | 27032 | 27047 | N/A | N/A | CTAACCCATAGGCTAT | 56 | C | 240 |
| | 27068 | 27083 | | | | | | |
| 1233258 | 27366 | 27381 | N/A | N/A | GCATTTAGGACCGTCC | 59 | C | 241 |
| 1233266 | 28584 | 28599 | N/A | N/A | AAGTTAATTGGTTGGG | 45 | C | 242 |
| 1233274 | 28753 | 28768 | N/A | N/A | AAGCAACGGTTACACT | 85 | C | 243 |
| 1233282 | 29060 | 29075 | N/A | N/A | CCCCGGTAAGAATTCT | 73 | C | 244 |
| 1233290 | 29462 | 29477 | N/A | N/A | AGTCAAATTAAGCCCA | 42 | C | 245 |
| 1233298 | 31516 | 31531 | N/A | N/A | GACTAACTAGCTTCAA | 105 | C | 246 |
| 1233306 | 31922 | 31937 | N/A | N/A | CAACCTAATCTTGAGT | 82 | C | 247 |
| 1233314 | 32154 | 32169 | N/A | N/A | ATGTAAAGACCCTTCC | 79 | C | 248 |
| 1233322 | 33917 | 33932 | N/A | N/A | GAATATTGGCTTGTCC | 78 | C | 249 |
| 1233330 | 34371 | 34386 | N/A | N/A | AGTTAGATGAAGTTGT | 70 | C | 250 |
| 1233338 | 34683 | 34698 | N/A | N/A | GCATTTACGCTTCCTC | 38 | C | 251 |
| 1232730 | 5112 | 5127 | 64 | 79 | AATTTTTGTCCCGTTG | 96 | D | 252 |
| 1232737 | 5138 | 5153 | 90 | 105 | ATGCCATCTTGACCCA | 47 | D | 22 |
| 1232739 | 5145 | 5160 | 97 | 112 | CTTCACGATGCCATCT | 55 | D | 253 |
| 1232747 | 5162 | 5177 | 114 | 129 | TTTACGGTGAACAACC | 56 | D | 254 |
| 1232755 | 5172 | 5187 | 124 | 139 | TGTATTACAGTTTACG | 57 | D | 255 |
| 1232763 | 5280 | 5295 | 232 | 247 | CTTACCAGAAAGTTCT | 53 | D | 256 |
| 1232771 | 5719 | 5734 | 671 | 686 | CGGCACACGGATGAGT | 70 | D | 257 |
| 1232779 | 5961 | 5976 | 913 | 928 | AAGTCGATCATTAGCG | 57 | D | 258 |
| 1232787 | 6007 | 6022 | 959 | 974 | AGCGAAGATCCACACG | 56 | D | 259 |
| 1232795 | 6033 | 6048 | 985 | 1000 | TCATAAAGGTCTCTCC | 54 | D | 260 |
| 1232803 | 10304 | 10319 | 1104 | 1119 | AAAGGTACTCCAGTAA | 68 | D | 261 |
| 1232811 | 10313 | 10328 | 1113 | 1128 | AGATTCTCGAAAGGTA | 75 | D | 262 |
| 1232819 | 11041 | 11056 | 1344 | 1359 | TCTTAATGGGACTCAC | 49 | D | 263 |
| 1232827 | 11528 | 11543 | 1831 | 1846 | TGCCGAGGATGGTCCA | 61 | D | 264 |
| 1232835 | 12081 | 12096 | 2384 | 2399 | CAAACGACTCCCTGGA | 67 | D | 265 |
| 1232843 | 12136 | 12151 | 2439 | 2454 | TTTCGAATTTGCCATA | 38 | D | 266 |
| 1232851 | 12235 | 12250 | 2538 | 2553 | GCTGAGAGATCTTGCA | 62 | D | 267 |
| 1232859 | 12454 | 12469 | 2757 | 2772 | CCCGATGACAGTTCTC | 40 | D | 268 |
| 1232867 | 16609 | 16624 | 2927 | 2942 | GCCCCGGCAAAAACTG | 94 | D | 269 |
| 1232875 | 16653 | 16668 | 2971 | 2986 | TCCAATTCAGTTAGAC | 45 | D | 270 |
| 1232883 | 16737 | 16752 | 3055 | 3070 | AATCTCCGAATGTTAC | 82 | D | 271 |
| 1232891 | 21127 | 21142 | 3098 | 3113 | GTCGAAGCAGCACTCA | 42 | D | 272 |
| 1232899 | 21202 | 21217 | 3173 | 3188 | TCCGAAGTCACCGAGG | 62 | D | 273 |
| 1232907 | 23026 | 23041 | 3301 | 3316 | AGGGAATGGCTGGTGC | 68 | D | 274 |
| 1232915 | 23081 | 23096 | 3356 | 3371 | TAAAATTGCGACTCCT | 80 | D | 275 |
| 1232923 | 31008 | 31023 | 3452 | 3467 | TACCGAGGACAAAGCT | 83 | D | 276 |
| 1232931 | 31064 | 31079 | 3508 | 3523 | TCTCCGAGAGTGTTGC | 46 | D | 277 |
| 1232939 | 35471 | 35486 | 3824 | 3839 | GACGACGGTCAGCTCA | 89† | D | 278 |
| 1232947 | 35487 | 35502 | 3840 | 3855 | ACCAAGAAGGCTCAAA | 78 | D | 279 |
| 1232955 | 35575 | 35590 | 3928 | 3943 | CTGGATGGATCGCAGC | 85 | D | 280 |
| 1232963 | 35715 | 35730 | 4068 | 4083 | AACACCCGATGCTGTC | 76 | D | 281 |
| 1232971 | 35882 | 35897 | 4235 | 4250 | GCGGGAATGATGATAT | 85 | D | 282 |
| 1232979 | 35923 | 35938 | 4276 | 4291 | AGTCAACTAGTTCTGT | 73 | D | 283 |
| 1232987 | 3627 | 3642 | N/A | N/A | GCTCCGCATACCCTCC | 98 | D | 284 |
| | 3690 | 3705 | | | | | | |
| 1232995 | 3635 | 3650 | N/A | N/A | CCCTATTAGCTCCGCA | 60 | D | 285 |
| | 3698 | 3713 | | | | | | |
| 1233003 | 3873 | 3888 | N/A | N/A | CTGGAAAACGGTGGAG | 94 | D | 286 |
| 1233011 | 6448 | 6463 | N/A | N/A | AATTATTACGGCCGGG | 66 | D | 287 |
| 1233019 | 6738 | 6753 | N/A | N/A | GAATTCCGACACATGC | 50 | D | 288 |
| 1233027 | 8481 | 8496 | N/A | N/A | GTATATAAGTACTGAC | 66 | D | 289 |
| 1233035 | 8735 | 8750 | N/A | N/A | GCAAAGACGGTGTAGT | 57 | D | 290 |
| 1233043 | 9823 | 9838 | N/A | N/A | CTAAGAAAGGTCACCC | 74 | D | 291 |
| 1233051 | 10432 | 10447 | N/A | N/A | AACCTATAGTATGGCC | 82 | D | 292 |
| 1233059 | 10831 | 10846 | N/A | N/A | CTACGGCAAAGACAGG | 92 | D | 293 |
| 1233067 | 12826 | 12841 | N/A | N/A | CTAAACTGGCATTCCC | 59 | D | 294 |
| 1233075 | 14024 | 14039 | N/A | N/A | TGCTTATAAGCCAACC | 33 | D | 295 |
| 1233083 | 14502 | 14517 | N/A | N/A | AAGGTGCTATCTAGAG | 16 | D | 296 |
| | 14648 | 14663 | | | | | | |
| | 14721 | 14736 | | | | | | |
| | 14794 | 14809 | | | | | | |
| | 14940 | 14955 | | | | | | |
| | 15013 | 15028 | | | | | | |
| | 15086 | 15101 | | | | | | |
| 1233091 | 15877 | 15892 | N/A | N/A | AAGAAAATCGCAAGCC | 79 | D | 297 |
| 1233099 | 17509 | 17524 | N/A | N/A | CCCTAATCCTCAAGAC | 108 | D | 298 |
| 1233107 | 18420 | 18435 | N/A | N/A | TGATAAGACTGGTGAC | 48 | D | 299 |
| 1233115 | 18604 | 18619 | N/A | N/A | ACTAAGATGTCTGTCC | 50 | D | 300 |
| 1233123 | 18922 | 18937 | N/A | N/A | AACACGGCGAGAGTCC | 62 | D | 301 |
| 1233131 | 19498 | 19513 | N/A | N/A | TACGATTTGAAATTTA | 81 | D | 302 |
| 1233139 | 20568 | 20583 | N/A | N/A | GAATACAGCACAAGGC | 59 | D | 303 |
| 1233147 | 20697 | 20712 | N/A | N/A | CCGGAATAGAGAAAGC | 50 | D | 304 |
| | 20739 | 20754 | | | | | | |
| | 20907 | 20922 | | | | | | |
| | 20991 | 21006 | | | | | | |
| 1233155 | 21604 | 21619 | N/A | N/A | TCTTATACAATATGAG | 69 | D | 305 |
| 1233163 | 23138 | 23153 | N/A | N/A | CATGAAGACTTACCCC | 80 | D | 306 |
| 1233171 | 23473 | 23488 | N/A | N/A | TATGCGATAACTTGCA | 96 | D | 307 |
| 1233179 | 23688 | 23703 | N/A | N/A | GGTAAAACATCCACCA | 109 | D | 308 |
| 1233187 | 24112 | 24127 | N/A | N/A | CTGTAGAGAGCCCATT | 75 | D | 309 |
| 1233195 | 24500 | 24515 | N/A | N/A | ATACCCTAAGGCGAGG | 53 | D | 310 |
| 1233203 | 24533 | 24548 | N/A | N/A | TAATATTCTAAGGCGA | 54 | D | 311 |
| 1233211 | 25294 | 25309 | N/A | N/A | AAGCTATAACATTAGC | 80 | D | 312 |
| 1233219 | 26554 | 26569 | N/A | N/A | CGTTACAAATCTAACA | 68 | D | 313 |
| 1233227 | 26781 | 26796 | N/A | N/A | AATCGATAGATCTACA | 64 | D | 314 |
| 1233235 | 26944 | 26959 | N/A | N/A | ACTTATAGATACCTAT | 95 | D | 315 |
| 1233243 | 27025 | 27040 | N/A | N/A | ATAGGCTATACCTAAC | 46 | D | 316 |
| | 27061 | 27076 | | | | | | |
| | 27097 | 27112 | | | | | | |
| | 27115 | 27130 | | | | | | |
| 1233251 | 27033 | 27048 | N/A | N/A | CCTAACCCATAGGCTA | 30 | D | 317 |
| | 27069 | 27084 | | | | | | |
| 1233259 | 27378 | 27393 | N/A | N/A | ACCGAAAGCAGAGCAT | 71 | D | 318 |
| 1233267 | 28585 | 28600 | N/A | N/A | TAAGTTAATTGGTTGG | 54 | D | 319 |
| 1233275 | 28754 | 28769 | N/A | N/A | TAAGCAACGGTTACAC | 59 | D | 320 |
| 1233283 | 29140 | 29155 | N/A | N/A | TAAGACTAATAGGCAA | 102 | D | 321 |
| 1233291 | 29498 | 29513 | N/A | N/A | CTCGATGGAATTAAGA | 62 | D | 322 |
| 1233299 | 31898 | 31913 | N/A | N/A | ATGAAGCGAGAGCCAT | 67 | D | 323 |
| 1233307 | 31949 | 31964 | N/A | N/A | AAATATCCACCACAAC | 104 | D | 324 |
| 1233315 | 32155 | 32170 | N/A | N/A | TATGTAAAGACCCTTC | 90 | D | 325 |
| 1233323 | 34083 | 34098 | N/A | N/A | AAACGGGTTGATTGCA | 48 | D | 326 |
| 1233331 | 34379 | 34394 | N/A | N/A | GTAGTTAGAGTTAGAT | 54 | D | 327 |
| 1233339 | 34874 | 34889 | N/A | N/A | CAATTAAACAGGTCAT | 77 | D | 328 |
| 1232731 | 5113 | 5128 | 65 | 80 | AAATTTTTGTCCCGTT | 85 | E | 329 |
| 1232737 | 5138 | 5153 | 90 | 105 | ATGCCATCTTGACCCA | 65 | E | 22 |
| 1232740 | 5147 | 5162 | 99 | 114 | CACTTCACGATGCCAT | 39 | E | 330 |
| 1232748 | 5163 | 5178 | 115 | 130 | GTTTACGGTGAACAAC | 77 | E | 331 |
| 1232756 | 5177 | 5192 | 129 | 144 | AGGATTGTATTACAGT | 70 | E | 332 |
| 1232764 | 5288 | 5303 | 240 | 255 | GCCAAATGCTTACCAG | 35 | E | 333 |
| 1232772 | 5723 | 5738 | 675 | 690 | AACACGGCACACGGAT | 50 | E | 334 |
| 1232780 | 5964 | 5979 | 916 | 931 | TTGAAGTCGATCATTA | 70 | E | 335 |
| 1232788 | 6008 | 6023 | 960 | 975 | CAGCGAAGATCCACAC | 54 | E | 336 |
| 1232796 | 6034 | 6049 | 986 | 1001 | CTCATAAAGGTCTCTC | 41 | E | 337 |
| 1232804 | 10305 | 10320 | 1105 | 1120 | GAAAGGTACTCCAGTA | 58 | E | 338 |
| 1232812 | 10317 | 10332 | 1117 | 1132 | ATAGAGATTCTCGAAA | 87 | E | 339 |
| 1232820 | 11042 | 11057 | 1345 | 1360 | ATCTTAATGGGACTCA | 47 | E | 340 |
| 1232828 | 11529 | 11544 | 1832 | 1847 | ATGCCGAGGATGGTCC | 58 | E | 341 |
| 1232836 | 12082 | 12097 | 2385 | 2400 | TCAAACGACTCCCTGG | 40 | E | 342 |
| 1232844 | 12138 | 12153 | 2441 | 2456 | CTTTTCGAATTTGCCA | 35 | E | 343 |
| 1232852 | 12357 | 12372 | 2660 | 2675 | CACGAAGTCCTCCTCC | 69 | E | 344 |
| 1232860 | 12456 | 12471 | 2759 | 2774 | CACCCGATGACAGTTC | 67 | E | 345 |
| 1232868 | 16611 | 16626 | 2929 | 2944 | AGGCCCCGGCAAAAAC | 88 | E | 346 |
| 1232876 | 16654 | 16669 | 2972 | 2987 | GTCCAATTCAGTTAGA | 51 | E | 347 |
| 1232884 | 16738 | 16753 | 3056 | 3071 | CAATCTCCGAATGTTA | 75 | E | 348 |
| 1232892 | 21129 | 21144 | 3100 | 3115 | ATGTCGAAGCAGCACT | 91 | E | 349 |
| 1232900 | 21203 | 21218 | 3174 | 3189 | TTCCGAAGTCACCGAG | 69 | E | 350 |
| 1232908 | 23039 | 23054 | 3314 | 3329 | ATAGAGTCTGGTCAGG | 52 | E | 351 |
| 1232916 | 23082 | 23097 | 3357 | 3372 | ATAAAATTGCGACTCC | 55 | E | 352 |
| 1232924 | 31009 | 31024 | 3453 | 3468 | GTACCGAGGACAAAGC | 66 | E | 353 |
| 1232932 | 31124 | 31139 | 3568 | 3583 | AACACCTGAAGCTTGC | 48 | E | 354 |
| 1232940 | 35472 | 35487 | 3825 | 3840 | AGACGACGGTCAGCTC | 77† | E | 355 |
| 1232948 | 35527 | 35542 | 3880 | 3895 | CCGGAGAACACTGGCG | 69 | E | 356 |
| 1232956 | 35605 | 35620 | 3958 | 3973 | CCGGAAGGATCACAGA | 85 | E | 357 |
| 1232964 | 35716 | 35731 | 4069 | 4084 | CAACACCCGATGCTGT | 74 | E | 358 |
| 1232972 | 35884 | 35899 | 4237 | 4252 | TAGCGGGAATGATGAT | 82 | E | 359 |
| 1232980 | 35926 | 35941 | 4279 | 4294 | TATAGTCAACTAGTTC | 56 | E | 360 |
| 1232988 | 3628 | 3643 | N/A | N/A | AGCTCCGCATACCCTC | 60 | E | 361 |
| | 3691 | 3706 | | | | | | |
| 1232996 | 3636 | 3651 | N/A | N/A | GCCCTATTAGCTCCGC | 78 | E | 362 |
| | 3699 | 3714 | | | | | | |
| 1233004 | 4024 | 4039 | N/A | N/A | ATCTTTAGATCTTCCA | 54 | E | 363 |
| 1233012 | 6449 | 6464 | N/A | N/A | AAATTATTACGGCCGG | 75 | E | 364 |
| 1233020 | 6831 | 6846 | N/A | N/A | GTAGAAGTAATCCAGG | 46 | E | 365 |
| 1233028 | 8483 | 8498 | N/A | N/A | GAGTATATAAGTACTG | 75 | E | 366 |
| 1233036 | 9083 | 9098 | N/A | N/A | CCCATAAAAGACCTCT | 64 | E | 367 |
| 1233044 | 9936 | 9951 | N/A | N/A | AAACATGCGAAGCAGG | 66 | E | 368 |
| 1233052 | 10433 | 10448 | N/A | N/A | GAACCTATAGTATGGC | 77 | E | 369 |
| 1233060 | 10834 | 10849 | N/A | N/A | AATCTACGGCAAAGAC | 98 | E | 370 |
| 1233068 | 12828 | 12843 | N/A | N/A | TGCTAAACTGGCATTC | 81 | E | 371 |
| 1233076 | 14045 | 14060 | N/A | N/A | CCGTAAGGTGAACCTT | 50 | E | 372 |
| 1233084 | 14547 | 14562 | N/A | N/A | AGCCCCCTACCAGGGC | 89 | E | 373 |
| | 15202 | 15217 | | | | | | |
| | 15275 | 15290 | | | | | | |
| 1233092 | 16541 | 16556 | N/A | N/A | AAGAAATCAGCCTCGA | 87 | E | 374 |
| 1233100 | 17665 | 17680 | N/A | N/A | ATATCGAGCATCATGG | 34 | E | 375 |
| 1233108 | 18422 | 18437 | N/A | N/A | ATTGATAAGACTGGTG | 45 | E | 376 |
| 1233116 | 18605 | 18620 | N/A | N/A | TACTAAGATGTCTGTC | 49 | E | 377 |
| 1233124 | 18997 | 19012 | N/A | N/A | CTCGAAGAATTGCTTG | 61 | E | 378 |
| 1233132 | 19500 | 19515 | N/A | N/A | ACTACGATTTGAAATT | 72 | E | 379 |
| 1233140 | 20576 | 20591 | N/A | N/A | GAGCTCCGGAATACAG | 79 | E | 380 |
| | 20954 | 20969 | | | | | | |
| 1233148 | 20698 | 20713 | N/A | N/A | TCCGGAATAGAGAAAG | 83 | E | 381 |
| | 20740 | 20755 | | | | | | |
| | 20908 | 20923 | | | | | | |
| | 20992 | 21007 | | | | | | |
| 1233156 | 21640 | 21655 | N/A | N/A | CAACATCGAGGGTCTG | 54 | E | 382 |
| 1233164 | 23210 | 23225 | N/A | N/A | CCAAAGTAACCCCCAT | 62 | E | 383 |
| 1233172 | 23475 | 23490 | N/A | N/A | ACTATGCGATAACTTG | 31 | E | 384 |
| 1233180 | 23689 | 23704 | N/A | N/A | AGGTAAAACATCCACC | 76 | E | 385 |
| 1233188 | 24157 | 24172 | N/A | N/A | AAATTGGAGGTCCCAC | 80 | E | 386 |
| 1233196 | 24501 | 24516 | N/A | N/A | AATACCCTAAGGCGAG | 50 | E | 387 |
| 1233204 | 24534 | 24549 | N/A | N/A | GTAATATTCTAAGGCG | 40 | E | 388 |
| 1233212 | 25671 | 25686 | N/A | N/A | AACCAGGCGGGTGTGT | 88 | E | 389 |
| 1233220 | 26568 | 26583 | N/A | N/A | AGTTAAGATCAGGTCG | 36 | E | 390 |
| 1233228 | 26782 | 26797 | N/A | N/A | CAATCGATAGATCTAC | 70 | E | 391 |
| 1233236 | 26945 | 26960 | N/A | N/A | CACTTATAGATACCTA | 68 | E | 392 |
| 1233244 | 27026 | 27041 | N/A | N/A | CATAGGCTATACCTAA | 29 | E | 393 |
| | 27062 | 27077 | | | | | | |
| | 27098 | 27113 | | | | | | |
| | 27116 | 27131 | | | | | | |
| 1233252 | 27099 | 27114 | N/A | N/A | ACATAGGCTATACCTA | 57 | E | 394 |
| | 27117 | 27132 | | | | | | |
| 1233260 | 27380 | 27395 | N/A | N/A | GAACCGAAAGCAGAGC | 58 | E | 395 |
| 1233268 | 28610 | 28625 | N/A | N/A | ACGGATATCTTGCCAT | 50 | E | 396 |
| 1233276 | 28756 | 28771 | N/A | N/A | ATTAAGCAACGGTTAC | 77 | E | 397 |
| 1233284 | 29142 | 29157 | N/A | N/A | AGTAAGACTAATAGGC | 81 | E | 398 |
| 1233292 | 29534 | 29549 | N/A | N/A | GCCTTTTAGAGCATAA | 60 | E | 399 |
| 1233300 | 31899 | 31914 | N/A | N/A | AATGAAGCGAGAGCCA | 61 | E | 400 |
| 1233308 | 32111 | 32126 | N/A | N/A | ACGAAGTTCGGTTCCT | 60 | E | 401 |
| 1233316 | 32156 | 32171 | N/A | N/A | CTATGTAAAGACCCTT | 63 | E | 402 |
| 1233324 | 34084 | 34099 | N/A | N/A | AAAACGGGTTGATTGC | 48 | E | 403 |
| 1233332 | 34381 | 34396 | N/A | N/A | AAGTAGTTAGAGTTAG | 53 | E | 404 |
| 1233340 | 34877 | 34892 | N/A | N/A | CGACAATTAAACAGGT | 68 | E | 405 |
| 1232732 | 5114 | 5129 | 66 | 81 | AAAATTTTTGTCCCGT | 78 | F | 406 |
| 1232737 | 5138 | 5153 | 90 | 105 | ATGCCATCTTGACCCA | 60 | F | 22 |
| 1232741 | 5148 | 5163 | 100 | 115 | CCACTTCACGATGCCA | 23 | F | 407 |
| 1232749 | 5164 | 5179 | 116 | 131 | AGTTTACGGTGAACAA | 62 | F | 408 |
| 1232757 | 5179 | 5194 | 131 | 146 | ACAGGATTGTATTACA | 81 | F | 409 |
| 1232765 | 5293 | 5308 | 245 | 260 | AGTTAGCCAAATGCTT | 79 | F | 410 |
| 1232773 | 5726 | 5741 | 678 | 693 | GTGAACACGGCACACG | 60 | F | 411 |
| 1232781 | 5965 | 5980 | 917 | 932 | ATTGAAGTCGATCATT | 87 | F | 412 |
| 1232789 | 6009 | 6024 | 961 | 976 | GCAGCGAAGATCCACA | 36 | F | 413 |
| 1232797 | 6035 | 6050 | 987 | 1002 | TCTCATAAAGGTCTCT | 42 | F | 414 |
| 1232805 | 10306 | 10321 | 1106 | 1121 | CGAAAGGTACTCCAGT | 38 | F | 415 |
| 1232813 | 10318 | 10333 | 1118 | 1133 | AATAGAGATTCTCGAA | 74 | F | 416 |
| 1232821 | 11043 | 11058 | 1346 | 1361 | CATCTTAATGGGACTC | 23 | F | 417 |
| 1232829 | 11530 | 11545 | 1833 | 1848 | CATGCCGAGGATGGTC | 58 | F | 418 |
| 1232837 | 12083 | 12098 | 2386 | 2401 | TTCAAACGACTCCCTG | 65 | F | 419 |
| 1232845 | 12139 | 12154 | 2442 | 2457 | CCTTTTCGAATTTGCC | 22 | F | 420 |
| 1232853 | 12358 | 12373 | 2661 | 2676 | GCACGAAGTCCTCCTC | 42 | F | 421 |
| 1232861 | 12458 | 12473 | 2761 | 2776 | TCCACCCGATGACAGT | 63 | F | 422 |
| 1232869 | 16615 | 16630 | 2933 | 2948 | AAAGAGGCCCCGGCAA | 73 | F | 423 |
| 1232877 | 16699 | 16714 | 3017 | 3032 | ACACAACACTCTCATC | 67 | F | 424 |
| 1232885 | 21111 | 21126 | 3082 | 3097 | TGCGAGAGGCCACAGC | 74 | F | 425 |
| 1232893 | 21131 | 21146 | 3102 | 3117 | AGATGTCGAAGCAGCA | 58 | F | 426 |
| 1232901 | 21204 | 21219 | 3175 | 3190 | ATTCCGAAGTCACCGA | 67 | F | 427 |
| 1232909 | 23040 | 23055 | 3315 | 3330 | CATAGAGTCTGGTCAG | 67 | F | 428 |
| 1232917 | 23083 | 23098 | 3358 | 3373 | CATAAAATTGCGACTC | 72 | F | 429 |
| 1232925 | 31010 | 31025 | 3454 | 3469 | AGTACCGAGGACAAAG | 62 | F | 430 |
| 1232933 | 31765 | 31780 | 3701 | 3716 | ACAGAACATCATGACC | 76† | F | 431 |
| 1232941 | 35473 | 35488 | 3826 | 3841 | AAGACGACGGTCAGCT | 91† | F | 432 |
| 1232949 | 35528 | 35543 | 3881 | 3896 | ACCGGAGAACACTGGC | 79 | F | 433 |
| 1232957 | 35608 | 35623 | 3961 | 3976 | CCACCGGAAGGATCAC | 79 | F | 434 |
| 1232965 | 35719 | 35734 | 4072 | 4087 | CAACAACACCCGATGC | 85 | F | 435 |
| 1232973 | 35885 | 35900 | 4238 | 4253 | ATAGCGGGAATGATGA | 65 | F | 436 |
| 1232981 | 3422 | 3437 | N/A | N/A | AAACTATGGTTGCTGC | 75 | F | 437 |
| 1232989 | 3629 | 3644 | N/A | N/A | TAGCTCCGCATACCCT | 60 | F | 438 |
| | 3692 | 3707 | | | | | | |
| 1232997 | 3637 | 3652 | N/A | N/A | AGCCCTATTAGCTCCG | 74 | F | 439 |
| | 3700 | 3715 | | | | | | |
| 1233005 | 4044 | 4059 | N/A | N/A | AACTAGCAATCACCTG | 78 | F | 440 |
| 1233013 | 6450 | 6465 | N/A | N/A | AAAATTATTACGGCCG | 87 | F | 441 |
| 1233021 | 6946 | 6961 | N/A | N/A | TACCGTATGATTCAGA | 41 | F | 442 |
| 1233029 | 8532 | 8547 | N/A | N/A | AGCAAAGTACTTCTAC | 61 | F | 443 |
| 1233037 | 9457 | 9472 | N/A | N/A | AACAAGAGTTAGTCAC | 79 | F | 444 |
| 1233045 | 9937 | 9952 | N/A | N/A | CAAACATGCGAAGCAG | 85 | F | 445 |
| 1233053 | 10544 | 10559 | N/A | N/A | CGCTTAATCACCGCCG | 49 | F | 446 |
| 1233061 | 10835 | 10850 | N/A | N/A | TAATCTACGGCAAAGA | 80 | F | 447 |
| 1233069 | 12841 | 12856 | N/A | N/A | ACTTAATACCTTGTGC | 82 | F | 448 |
| 1233077 | 14297 | 14312 | N/A | N/A | CAAAATCCATACGCTG | 67 | F | 449 |
| 1233085 | 14571 | 14586 | N/A | N/A | TGCCATCTAGAGGGAT | 34 | F | 450 |
| | 14863 | 14878 | | | | | | |
| | 15153 | 15168 | | | | | | |
| | 15226 | 15241 | | | | | | |
| 1233093 | 16573 | 16588 | N/A | N/A | CAATCTAGGAATTAGA | 99 | F | 451 |
| 1233101 | 17666 | 17681 | N/A | N/A | TATATCGAGCATCATG | 44 | F | 452 |
| 1233109 | 18423 | 18438 | N/A | N/A | AATTGATAAGACTGGT | 50 | F | 453 |
| 1233117 | 18606 | 18621 | N/A | N/A | GTACTAAGATGTCTGT | 31 | F | 454 |
| 1233125 | 18998 | 19013 | N/A | N/A | ACTCGAAGAATTGCTT | 50 | F | 455 |
| 1233133 | 19535 | 19550 | N/A | N/A | AAGGTTAAATGTCCCA | 46 | F | 456 |
| 1233141 | 20577 | 20592 | N/A | N/A | AGAGCTCCGGAATACA | 55 | F | 457 |
| | 20955 | 20970 | | | | | | |
| 1233149 | 20699 | 20714 | N/A | N/A | CTCCGGAATAGAGAAA | 63 | F | 458 |
| | 20741 | 20756 | | | | | | |
| | 20909 | 20924 | | | | | | |
| | 20993 | 21008 | | | | | | |
| 1233157 | 21641 | 21656 | N/A | N/A | ACAACATCGAGGGTCT | 28 | F | 459 |
| 1233165 | 23211 | 23226 | N/A | N/A | ACCAAAGTAACCCCCA | 55 | F | 460 |
| 1233173 | 23476 | 23491 | N/A | N/A | CACTATGCGATAACTT | 58 | F | 461 |
| 1233181 | 23817 | 23832 | N/A | N/A | TATTAGTGGGTATTCC | 65 | F | 462 |
| 1233189 | 24160 | 24175 | N/A | N/A | GCTAAATTGGAGGTCC | 51 | F | 463 |
| 1233197 | 24502 | 24517 | N/A | N/A | TAATACCCTAAGGCGA | 76 | F | 464 |
| 1233205 | 25020 | 25035 | N/A | N/A | AGTAACTACATAGAGC | 46 | F | 465 |
| 1233213 | 25673 | 25688 | N/A | N/A | TAAACCAGGCGGGTGT | 86 | F | 466 |
| 1233221 | 26683 | 26698 | N/A | N/A | AGATAGGGTGTTATGG | 36 | F | 467 |
| 1233229 | 26784 | 26799 | N/A | N/A | CCCAATCGATAGATCT | 30 | F | 468 |
| 1233237 | 26967 | 26982 | N/A | N/A | AAAAGTCTCGACTGAT | 53 | F | 469 |
| 1233245 | 27027 | 27042 | N/A | N/A | CCATAGGCTATACCTA | 51 | F | 470 |
| | 27063 | 27078 | | | | | | |
| 1233253 | 27136 | 27151 | N/A | N/A | AAATGTAGCTATACCT | 91 | F | 471 |
| 1233261 | 27498 | 27513 | N/A | N/A | AGCTAAGATGTCACTC | 75 | F | 472 |
| 1233269 | 28614 | 28629 | N/A | N/A | AAGCACGGATATCTTG | 68 | F | 473 |
| 1233277 | 28758 | 28773 | N/A | N/A | CTATTAAGCAACGGTT | 55 | F | 474 |
| 1233285 | 29143 | 29158 | N/A | N/A | AAGTAAGACTAATAGG | 81 | F | 475 |
| 1233293 | 30599 | 30614 | N/A | N/A | AATCCCCGTAACACTG | 80 | F | 476 |
| 1233301 | 31900 | 31915 | N/A | N/A | AAATGAAGCGAGAGCC | 80 | F | 477 |
| 1233309 | 32112 | 32127 | N/A | N/A | TACGAAGTTCGGTTCC | 53 | F | 478 |
| 1233317 | 32914 | 32929 | N/A | N/A | TATAATCTGGAGGCCA | 79 | F | 479 |
| 1233325 | 34085 | 34100 | N/A | N/A | GAAAACGGGTTGATTG | 71 | F | 480 |
| 1233333 | 34413 | 34428 | N/A | N/A | AATGTACGGTACTTAA | 69 | F | 481 |
| 1233341 | 34910 | 34925 | N/A | N/A | TATAATGAACCCCCTG | 77 | F | 482 |
| 1232733 | 5129 | 5144 | 81 | 96 | TGACCCATCAGCAAGA | 74 | G | 483 |
| 1232737 | 5138 | 5153 | 90 | 105 | ATGCCATCTTGACCCA | 72 | G | 22 |
| 1232742 | 5152 | 5167 | 104 | 119 | ACAACCACTTCACGAT | 70 | G | 484 |
| 1232750 | 5165 | 5180 | 117 | 132 | CAGTTTACGGTGAACA | 57 | G | 485 |
| 1232758 | 5184 | 5199 | 136 | 151 | CATAAACAGGATTGTA | 78 | G | 486 |
| 1232766 | 5294 | 5309 | 246 | 261 | AAGTTAGCCAAATGCT | 62 | G | 487 |
| 1232774 | 5727 | 5742 | 679 | 694 | AGTGAACACGGCACAC | 64 | G | 488 |
| 1232782 | 5966 | 5981 | 918 | 933 | CATTGAAGTCGATCAT | 84 | G | 489 |
| 1232790 | 6010 | 6025 | 962 | 977 | CGCAGCGAAGATCCAC | 45 | G | 490 |
| 1232798 | 10244 | 10259 | 1044 | 1059 | TGGGATTCGAAACACG | 84 | G | 491 |
| 1232806 | 10307 | 10322 | 1107 | 1122 | TCGAAAGGTACTCCAG | 41 | G | 492 |
| 1232814 | 10319 | 10334 | 1119 | 1134 | AAATAGAGATTCTCGA | 77 | G | 493 |
| 1232822 | 11213 | 11228 | 1516 | 1531 | CGACAGTGGATATAGA | 66 | G | 494 |
| 1232830 | 11531 | 11546 | 1834 | 1849 | ACATGCCGAGGATGGT | 66 | G | 495 |
| 1232838 | 12086 | 12101 | 2389 | 2404 | AGCTTCAAACGACTCC | 48 | G | 496 |
| 1232846 | 12140 | 12155 | 2443 | 2458 | CCCTTTTCGAATTTGC | 43 | G | 497 |
| 1232854 | 12377 | 12392 | 2680 | 2695 | AAATAGTCCATGGCCC | 69 | G | 498 |
| 1232862 | 12459 | 12474 | 2762 | 2777 | CTCCACCCGATGACAG | 62 | G | 499 |
| 1232870 | 16616 | 16631 | 2934 | 2949 | AAAAGAGGCCCCGGCA | 71 | G | 500 |
| 1232878 | 16732 | 16747 | 3050 | 3065 | CCGAATGTTACAGCCA | 44 | G | 501 |
| 1232886 | 21112 | 21127 | 3083 | 3098 | ATGCGAGAGGCCACAG | 68 | G | 502 |
| 1232894 | 21135 | 21150 | 3106 | 3121 | AAGGAGATGTCGAAGC | 70 | G | 503 |
| 1232902 | 21205 | 21220 | 3176 | 3191 | GATTCCGAAGTCACCG | 74 | G | 504 |
| 1232910 | 23041 | 23056 | 3316 | 3331 | ACATAGAGTCTGGTCA | 66 | G | 505 |
| 1232918 | 23084 | 23099 | 3359 | 3374 | ACATAAAATTGCGACT | 86 | G | 506 |
| 1232926 | 31011 | 31026 | 3455 | 3470 | GAGTACCGAGGACAAA | 79 | G | 507 |
| 1232934 | 35434 | 35449 | 3787 | 3802 | TCTAACGCACTTTTTG | 21† | G | 508 |
| 1232942 | 35474 | 35489 | 3827 | 3842 | AAAGACGACGGTCAGC | 80† | G | 509 |
| 1232950 | 35529 | 35544 | 3882 | 3897 | GACCGGAGAACACTGG | 73 | G | 510 |
| 1232958 | 35610 | 35625 | 3963 | 3978 | CTCCACCGGAAGGATC | 85 | G | 511 |
| 1232966 | 35724 | 35739 | 4077 | 4092 | GATGACAACAACACCC | 84 | G | 512 |
| 1232974 | 35886 | 35901 | 4239 | 4254 | GATAGCGGGAATGATG | 106 | G | 513 |
| 1232982 | 3621 | 3636 | N/A | N/A | CATACCCTCCCAGCTC | 81 | G | 514 |
| | 3684 | 3699 | | | | | | |
| 1232990 | 3630 | 3645 | N/A | N/A | TTAGCTCCGCATACCC | 82 | G | 515 |
| | 3693 | 3708 | | | | | | |
| 1232998 | 3638 | 3653 | N/A | N/A | CAGCCCTATTAGCTCC | 65 | G | 516 |
| | 3701 | 3716 | | | | | | |
| 1233006 | 4203 | 4218 | N/A | N/A | AGATATGAGACCATGT | 71 | G | 517 |
| 1233014 | 6451 | 6466 | N/A | N/A | AAAAATTATTACGGCC | 94 | G | 518 |
| 1233022 | 7764 | 7779 | N/A | N/A | CACTACCGTGAGAGGG | 60 | G | 519 |
| 1233030 | 8595 | 8610 | N/A | N/A | GATAATACCAGAAGCT | 74 | G | 520 |
| 1233038 | 9500 | 9515 | N/A | N/A | TATCTTAAGAAGGCAT | 74 | G | 521 |
| 1233046 | 10064 | 10079 | N/A | N/A | CAAAAGTCTGGTTGGG | 73 | G | 522 |
| 1233054 | 10581 | 10596 | N/A | N/A | TAAGTAATCTGCATCC | 75 | G | 523 |
| 1233062 | 10841 | 10856 | N/A | N/A | TTACGGTAATCTACGG | 76 | G | 524 |
| 1233070 | 12842 | 12857 | N/A | N/A | TACTTAATACCTTGTG | 89 | G | 525 |
| 1233078 | 14375 | 14390 | N/A | N/A | TAATGAGTAGTTCTGC | 78 | G | 526 |
| 1233086 | 14686 | 14701 | N/A | N/A | TGCCAGGGCTCCAATC | 86 | G | 527 |
| | 14832 | 14847 | | | | | | |
| | 14978 | 14993 | | | | | | |
| 1233094 | 17257 | 17272 | N/A | N/A | ATCTTAGACTTTCGGC | 60 | G | 528 |
| 1233102 | 17667 | 17682 | N/A | N/A | ATATATCGAGCATCAT | 46 | G | 529 |
| 1233110 | 18461 | 18476 | N/A | N/A | GACGAGGAAAAGTGGA | 71 | G | 530 |
| 1233118 | 18734 | 18749 | N/A | N/A | ATCGAATCAGAATTTT | 57 | G | 531 |
| 1233126 | 18999 | 19014 | N/A | N/A | TACTCGAAGAATTGCT | 55 | G | 532 |
| 1233134 | 19536 | 19551 | N/A | N/A | TAAGGTTAAATGTCCC | 74 | G | 533 |
| 1233142 | 20579 | 20594 | N/A | N/A | AGAGAGCTCCGGAATA | 59 | G | 534 |
| | 20705 | 20720 | | | | | | |
| | 20747 | 20762 | | | | | | |
| | 20915 | 20930 | | | | | | |
| | 20957 | 20972 | | | | | | |
| 1233150 | 20700 | 20715 | N/A | N/A | GCTCCGGAATAGAGAA | 65 | G | 535 |
| | 20742 | 20757 | | | | | | |
| | 20910 | 20925 | | | | | | |
| | 20994 | 21009 | | | | | | |
| 1233158 | 22431 | 22446 | N/A | N/A | GCATAATGTCCCCGAG | 52 | G | 536 |
| 1233166 | 23212 | 23227 | N/A | N/A | GACCAAAGTAACCCCC | 62 | G | 537 |
| 1233174 | 23494 | 23509 | N/A | N/A | TAGTGTAGAGGCTGCA | 22 | G | 538 |
| | 23527 | 23542 | | | | | | |
| 1233182 | 23819 | 23834 | N/A | N/A | ATTATTAGTGGGTATT | 80 | G | 539 |
| 1233190 | 24161 | 24176 | N/A | N/A | AGCTAAATTGGAGGTC | 79 | G | 540 |
| 1233198 | 24526 | 24541 | N/A | N/A | CTAAGGCGATTTGCTA | 64 | G | 541 |
| 1233206 | 25159 | 25174 | N/A | N/A | CCTATAAGGACCCAGC | 46 | G | 542 |
| 1233214 | 26089 | 26104 | N/A | N/A | ACCAATATATGTTCAC | 71 | G | 543 |
| 1233222 | 26686 | 26701 | N/A | N/A | AATAGATAGGGTGTTA | 68 | G | 544 |
| 1233230 | 26810 | 26825 | N/A | N/A | GTAAAGCACACTATGG | 64 | G | 545 |
| 1233238 | 26968 | 26983 | N/A | N/A | TAAAAGTCTCGACTGA | 56 | G | 546 |
| 1233246 | 27028 | 27043 | N/A | N/A | CCCATAGGCTATACCT | 34 | G | 547 |
| | 27064 | 27079 | | | | | | |
| 1233254 | 27154 | 27169 | N/A | N/A | CCAAAGTTCGAGAGAA | 79 | G | 548 |
| 1233262 | 27769 | 27784 | N/A | N/A | TAATTCATAGCTGGGC | 76 | G | 549 |
| 1233270 | 28621 | 28636 | N/A | N/A | ATTTACCAAGCACGGA | 45 | G | 550 |
| 1233278 | 28759 | 28774 | N/A | N/A | ACTATTAAGCAACGGT | 42 | G | 551 |
| 1233286 | 29147 | 29162 | N/A | N/A | CAGTAAGTAAGACTAA | 89 | G | 552 |
| 1233294 | 30605 | 30620 | N/A | N/A | ACTAATAATCCCCGTA | 91 | G | 553 |
| 1233302 | 31901 | 31916 | N/A | N/A | CAAATGAAGCGAGAGC | 66 | G | 554 |
| 1233310 | 32115 | 32130 | N/A | N/A | TTCTACGAAGTTCGGT | 62 | G | 555 |
| 1233318 | 33720 | 33735 | N/A | N/A | ACATAGCACATAAGAT | 79 | G | 556 |
| 1233326 | 34086 | 34101 | N/A | N/A | AGAAAACGGGTTGATT | 75 | G | 557 |
| 1233334 | 34414 | 34429 | N/A | N/A | TAATGTACGGTACTTA | 78 | G | 558 |
| 1233342 | 34961 | 34976 | N/A | N/A | TAACTATCTAGTTGGG | 65 | G | 559 |
| 1232734 | 5131 | 5146 | 83 | 98 | CTTGACCCATCAGCAA | 72 | H | 560 |
| 1232737 | 5138 | 5153 | 90 | 105 | ATGCCATCTTGACCCA | 59 | H | 22 |
| 1232743 | 5157 | 5172 | 109 | 124 | GGTGAACAACCACTTC | 85 | H | 561 |
| 1232751 | 5166 | 5181 | 118 | 133 | ACAGTTTACGGTGAAC | 58 | H | 562 |
| 1232759 | 5185 | 5200 | 137 | 152 | CCATAAACAGGATTGT | 85 | H | 563 |
| 1232767 | 5596 | 5611 | 548 | 563 | AGTTAGCCAAGGCCGG | 61 | H | 564 |
| 1232775 | 5735 | 5750 | 687 | 702 | TACCAGGCAGTGAACA | 70 | H | 565 |
| 1232783 | 5967 | 5982 | 919 | 934 | CCATTGAAGTCGATCA | 72 | H | 566 |
| 1232791 | 6011 | 6026 | 963 | 978 | TCGCAGCGAAGATCCA | 56 | H | 567 |
| 1232799 | 10245 | 10260 | 1045 | 1060 | GTGGGATTCGAAACAC | 96 | H | 568 |
| 1232807 | 10308 | 10323 | 1108 | 1123 | CTCGAAAGGTACTCCA | 44 | H | 569 |
| 1232815 | 10905 | 10920 | 1208 | 1223 | ACCCAGACGGGCATTC | 73 | H | 570 |
| 1232823 | 11303 | 11318 | 1606 | 1621 | CTCACGATCTTGTGGA | 69 | H | 571 |
| 1232831 | 11898 | 11913 | 2201 | 2216 | CCTGAGGTCGGACTCC | 42 | H | 572 |
| 1232839 | 12114 | 12129 | 2417 | 2432 | CAGAAGGACTGTCACG | 70 | H | 573 |
| 1232847 | 12141 | 12156 | 2444 | 2459 | CCCCTTTTCGAATTTG | 64 | H | 574 |
| 1232855 | 12378 | 12393 | 2681 | 2696 | GAAATAGTCCATGGCC | 72 | H | 575 |
| 1232863 | 12487 | 12502 | 2790 | 2805 | TGTTATGGAGAAACCC | 73 | H | 576 |
| 1232871 | 16617 | 16632 | 2935 | 2950 | GAAAAGAGGCCCCGGC | 55 | H | 577 |
| 1232879 | 16733 | 16748 | 3051 | 3066 | TCCGAATGTTACAGCC | 46 | H | 578 |
| 1232887 | 21113 | 21128 | 3084 | 3099 | CATGCGAGAGGCCACA | 82 | H | 579 |
| 1232895 | 21137 | 21152 | 3108 | 3123 | CCAAGGAGATGTCGAA | 76 | H | 580 |
| 1232903 | 21206 | 21221 | 3177 | 3192 | TGATTCCGAAGTCACC | 87 | H | 581 |
| 1232911 | 23043 | 23058 | 3318 | 3333 | CCACATAGAGTCTGGT | 91 | H | 582 |
| 1232919 | 23085 | 23100 | 3360 | 3375 | CACATAAAATTGCGAC | 61 | H | 583 |
| 1232927 | 31021 | 31036 | 3465 | 3480 | GATTAGTGCTGAGTAC | 66 | H | 584 |
| 1232935 | 35435 | 35450 | 3788 | 3803 | TTCTAACGCACTTTTT | 36† | H | 585 |
| 1232943 | 35475 | 35490 | 3828 | 3843 | CAAAGACGACGGTCAG | 104† | H | 586 |
| 1232951 | 35530 | 35545 | 3883 | 3898 | GGACCGGAGAACACTG | 94 | H | 587 |
| 1232959 | 35671 | 35686 | 4024 | 4039 | GTAAAGGAGATGCCCA | 80 | H | 588 |
| 1232967 | 35755 | 35770 | 4108 | 4123 | CAAGAGGAACATCCTC | 105 | H | 589 |
| 1232975 | 35887 | 35902 | 4240 | 4255 | AGATAGCGGGAATGAT | 83 | H | 590 |
| 1232983 | 3622 | 3637 | N/A | N/A | GCATACCCTCCCAGCT | 118 | H | 591 |
| | 3685 | 3700 | | | | | | |
| 1232991 | 3631 | 3646 | N/A | N/A | ATTAGCTCCGCATACC | 100 | H | 592 |
| | 3694 | 3709 | | | | | | |
| 1232999 | 3660 | 3675 | N/A | N/A | CCTGAGGTGACTGCTC | 56 | H | 593 |
| | 3723 | 3738 | | | | | | |
| 1233007 | 4264 | 4279 | N/A | N/A | GACTAGGAAGCCTGCC | 96 | H | 594 |
| 1233015 | 6452 | 6467 | N/A | N/A | TAAAAATTATTACGGC | 99 | H | 595 |
| 1233023 | 7861 | 7876 | N/A | N/A | GACTAATCATGGCAGG | 79 | H | 596 |
| 1233031 | 8596 | 8611 | N/A | N/A | GGATAATACCAGAAGC | 86 | H | 597 |
| 1233039 | 9512 | 9527 | N/A | N/A | CACTAGATAGCATATC | 81 | H | 598 |
| 1233047 | 10162 | 10177 | N/A | N/A | CAATTGAAACCTGGCC | 75 | H | 599 |
| 1233055 | 10697 | 10712 | N/A | N/A | TAGGAAAGGTGCCGAG | 85 | H | 600 |
| 1233063 | 10842 | 10857 | N/A | N/A | CTTACGGTAATCTACG | 95 | H | 601 |
| 1233071 | 12866 | 12881 | N/A | N/A | ATATTTGTAGGCAATC | 74 | H | 602 |
| 1233079 | 14378 | 14393 | N/A | N/A | TCTTAATGAGTAGTTC | 92 | H | 603 |
| 1233087 | 15661 | 15676 | N/A | N/A | AGCTATATGGATCTTT | 73 | H | 604 |
| 1233095 | 17440 | 17455 | N/A | N/A | ACATTAGGTCTTGTGT | 71 | H | 605 |
| 1233103 | 17668 | 17683 | N/A | N/A | AATATATCGAGCATCA | 39 | H | 606 |
| 1233111 | 18558 | 18573 | N/A | N/A | AAACGCAAACCCCATC | 82 | H | 607 |
| 1233119 | 18738 | 18753 | N/A | N/A | CACAATCGAATCAGAA | 60 | H | 608 |
| 1233127 | 19001 | 19016 | N/A | N/A | ACTACTCGAAGAATTG | 47 | H | 609 |
| 1233135 | 19743 | 19758 | N/A | N/A | CAATAGTTCATAGGTC | 88 | H | 610 |
| 1233143 | 20582 | 20597 | N/A | N/A | ACCAGAGAGCTCCGGA | 35 | H | 611 |
| | 20708 | 20723 | | | | | | |
| | 20750 | 20765 | | | | | | |
| | 20918 | 20933 | | | | | | |
| 1233151 | 20701 | 20716 | N/A | N/A | AGCTCCGGAATAGAGA | 67 | H | 612 |
| | 20743 | 20758 | | | | | | |
| | 20911 | 20926 | | | | | | |
| | 20995 | 21010 | | | | | | |
| 1233159 | 22482 | 22497 | N/A | N/A | TATAAGGACAATCAGA | 88 | H | 613 |
| 1233167 | 23284 | 23299 | N/A | N/A | ACATTATATGCCTCCA | 36 | H | 614 |
| 1233175 | 23495 | 23510 | N/A | N/A | CTAGTGTAGAGGCTGC | 18 | H | 615 |
| | 23528 | 23543 | | | | | | |
| 1233183 | 23820 | 23835 | N/A | N/A | GATTATTAGTGGGTAT | 53 | H | 616 |
| 1233191 | 24162 | 24177 | N/A | N/A | AAGCTAAATTGGAGGT | 83 | H | 617 |
| 1233199 | 24527 | 24542 | N/A | N/A | TCTAAGGCGATTTGCT | 67 | H | 618 |
| 1233207 | 25160 | 25175 | N/A | N/A | ACCTATAAGGACCCAG | 43 | H | 619 |
| 1233215 | 26091 | 26106 | N/A | N/A | CAACCAATATATGTTC | 86 | H | 620 |
| 1233223 | 26689 | 26704 | N/A | N/A | TTCAATAGATAGGGTG | 55 | H | 621 |
| 1233231 | 26814 | 26829 | N/A | N/A | TATGGTAAAGCACACT | 55 | H | 622 |
| 1233239 | 26971 | 26986 | N/A | N/A | GCATAAAAGTCTCGAC | 39 | H | 623 |
| 1233247 | 27029 | 27044 | N/A | N/A | ACCCATAGGCTATACC | 40 | H | 624 |
| | 27065 | 27080 | | | | | | |
| 1233255 | 27241 | 27256 | N/A | N/A | TAAACCAATGTTGCAA | 52 | H | 625 |
| 1233263 | 27771 | 27786 | N/A | N/A | ACTAATTCATAGCTGG | 78 | H | 626 |
| 1233271 | 28638 | 28653 | N/A | N/A | ACCTAACTGAGCTCTA | 75 | H | 627 |
| 1233279 | 28760 | 28775 | N/A | N/A | AACTATTAAGCAACGG | 35 | H | 628 |
| 1233287 | 29358 | 29373 | N/A | N/A | GAATAGCGCAGGTGAT | 76 | H | 629 |
| 1233295 | 31140 | 31155 | N/A | N/A | CCAAAGGACTTACTCC | 88 | H | 630 |
| 1233303 | 31902 | 31917 | N/A | N/A | GCAAATGAAGCGAGAG | 59 | H | 631 |
| 1233311 | 32125 | 32140 | N/A | N/A | CATAGACGAGTTCTAC | 78 | H | 632 |
| 1233319 | 33801 | 33816 | N/A | N/A | CATTAATATGGACAGA | 76 | H | 633 |
| 1233327 | 34088 | 34103 | N/A | N/A | TGAGAAAACGGGTTGA | 69 | H | 634 |
| 1233335 | 34415 | 34430 | N/A | N/A | CTAATGTACGGTACTT | 64 | H | 635 |
| 1233343 | 34962 | 34977 | N/A | N/A | TTAACTATCTAGTTGG | 82 | H | 636 |
| 1232737 | 5138 | 5153 | 90 | 105 | ATGCCATCTTGACCCA | 59 | I | 22 |
| 1241411 | 5061 | 5076 | 13 | 28 | ATTCCTCAACTTCAGT | 59 | I | 637 |
| 1241435 | 5144 | 5159 | 96 | 111 | TTCACGATGCCATCTT | 29 | I | 638 |
| 1241459 | 5251 | 5266 | 203 | 218 | TCCAGGAGTGTGTCCT | 20 | I | 639 |
| 1241483 | 5632 | 5647 | 584 | 599 | CATGACTGTAACAAGT | 41 | I | 640 |
| 1241507 | 5761 | 5776 | 713 | 728 | TCCTTAGGCTTCGGTC | 45 | I | 641 |
| 1241531 | 5896 | 5911 | 848 | 863 | GATGCAGCCCTTCTGG | 66 | I | 642 |
| 1241555 | 5971 | 5986 | 923 | 938 | CTCCCCATTGAAGTCG | 50 | I | 643 |
| 1241579 | 6021 | 6036 | 973 | 988 | CTCCTGTTGATCGCAG | 28 | I | 644 |
| 1241603 | 10249 | 10264 | 1049 | 1064 | CACAGTGGGATTCGAA | 54 | I | 645 |
| 1241627 | N/A | N/A | 1143 | 1158 | TACGGTAATCTTTCTT | 29 | I | 646 |
| 1241651 | 10889 | 10904 | 1192 | 1207 | CTGTCTTCAATGCACT | 44 | I | 647 |
| 1241675 | 11081 | 11096 | 1384 | 1399 | GGCTCAGAATGCTCAT | 36 | I | 648 |
| 1241699 | 11300 | 11315 | 1603 | 1618 | ACGATCTTGTGGATGG | 27 | I | 649 |
| 1241723 | 11425 | 11440 | 1728 | 1743 | TCAGGAGAATGTCTCC | 37 | I | 650 |
| 1241747 | 11735 | 11750 | 2038 | 2053 | GATGTCTGGGCAAGGC | 32 | i | 651 |
| 1241771 | 11947 | 11962 | 2250 | 2265 | GGTTCATCCTCAGGAA | 48 | I | 652 |
| 1241794 | 12146 | 12161 | 2449 | 2464 | AAATACCCCTTTTCGA | 100 | I | 653 |
| 1241818 | 12228 | 12243 | 2531 | 2546 | GATCTTGCAACTTAAT | 33 | I | 654 |
| 1241841 | 12361 | 12376 | 2664 | 2679 | TTTGCACGAAGTCCTC | 23 | I | 655 |
| 1241865 | 12466 | 12481 | 2769 | 2784 | ACAGTGACTCCACCCG | 11 | I | 656 |
| 1241889 | 12541 | 12556 | 2844 | 2859 | GCACCATATCAAGGTG | 91 | I | 657 |
| 1241913 | 16586 | 16601 | 2904 | 2919 | GGTGGCTGTTCACCAA | 48 | I | 658 |
| 1241937 | 16740 | 16755 | 3058 | 3073 | CACAATCTCCGAATGT | 69 | I | 659 |
| 1241961 | 21249 | 21264 | 3220 | 3235 | TTCAGATTGCACAACA | 36 | I | 660 |
| 1241985 | 23006 | 23021 | 3281 | 3296 | TACTGATGCAAGATCC | 26 | I | 661 |
| 1242009 | 23054 | 23069 | 3329 | 3344 | GGCATTCTCCCCCACA | 21 | I | 662 |
| 1242033 | 23117 | 23132 | 3392 | 3407 | CTGCAGGTTACACTGT | 90 | I | 663 |
| 1242057 | 31013 | 31028 | 3457 | 3472 | CTGAGTACCGAGGACA | 37 | I | 664 |
| 1242081 | 31057 | 31072 | 3501 | 3516 | GAGTGTTGCCTCGCAG | 19 | I | 665 |
| 1242105 | 31123 | 31138 | 3567 | 3582 | ACACCTGAAGCTTGCA | 27 | I | 666 |
| 1242129 | 31738 | 31753 | 3674 | 3689 | CAGGTCATTGTTGCCC | 72 | I | 667 |
| 1242153 | 35492 | 35507 | 3845 | 3860 | CTCCTACCAAGAAGGC | 104 | I | 668 |
| 1242177 | 35668 | 35683 | 4021 | 4036 | AAGGAGATGCCCAAGC | 56 | I | 669 |
| 1242201 | 35774 | 35789 | 4127 | 4142 | GCTAATTACATGAGGT | 12 | I | 670 |
| 1242225 | 35912 | 35927 | 4265 | 4280 | TCTGTGTTATGGTCAG | 72 | I | 671 |
| 1242249 | N/A | N/A | N/A | N/A | CACCAACCAGAGCTTC | 72 | I | 672 |
| 1242273 | 6741 | 6756 | N/A | N/A | AGGGAATTCCGACACA | 17 | I | 673 |
| 1242297 | 7859 | 7874 | N/A | N/A | CTAATCATGGCAGGTG | 49 | I | 674 |
| 1242321 | 8594 | 8609 | N/A | N/A | ATAATACCAGAAGCTG | 58 | I | 675 |
| 1242345 | 9502 | 9517 | N/A | N/A | CATATCTTAAGAAGGC | 36 | I | 676 |
| 1242369 | 10228 | 10243 | N/A | N/A | TGCATTATCTGAACCT | 55 | I | 677 |
| 1242393 | 12704 | 12719 | N/A | N/A | TATGATGTAGCTGTGG | 22 | I | 678 |
| 1242417 | 13107 | 13122 | N/A | N/A | CATACCAGTCTTCAGT | 62 | I | 679 |
| 1242441 | 14480 | 14495 | N/A | N/A | GTGCTGAGCCTCCTAC | 15 | I | 680 |
| | 14626 | 14641 | | | | | | |
| | 14772 | 14787 | | | | | | |
| | 15064 | 15079 | | | | | | |
| 1242465 | 14545 | 14560 | N/A | N/A | CCCCCTACCAGGGCTC | 63 | I | 681 |
| | 15200 | 15215 | | | | | | |
| | 15273 | 15288 | | | | | | |
| 1242489 | 14589 | 14604 | N/A | N/A | TCCTCAGAGTAAGGCA | 21 | I | 682 |
| | 14881 | 14896 | | | | | | |
| | 15171 | 15186 | | | | | | |
| | 15244 | 15259 | | | | | | |
| 1242513 | 14687 | 14702 | N/A | N/A | CTGCCAGGGCTCCAAT | 45 | I | 683 |
| | 14833 | 14848 | | | | | | |
| | 14979 | 14994 | | | | | | |
| 1242537 | 17441 | 17456 | N/A | N/A | AACATTAGGTCTTGTG | 22 | I | 684 |
| 1242561 | 18372 | 18387 | N/A | N/A | GCAAAATGTCCTAGAG | 45 | I | 685 |
| 1242585 | 19664 | 19679 | N/A | N/A | CAAATGGATCTCTACT | 52 | I | 686 |
| 1242609 | 20570 | 20585 | N/A | N/A | CGGAATACAGCACAAG | 32 | I | 687 |
| 1242633 | 20696 | 20711 | N/A | N/A | CGGAATAGAGAAAGCA | 9 | I | 688 |
| | 20738 | 20753 | | | | | | |
| | 20906 | 20921 | | | | | | |
| | 20990 | 21005 | | | | | | |
| 1242657 | 21600 | 21615 | N/A | N/A | ATACAATATGAGGACC | 55 | I | 689 |
| 1242680 | 22670 | 22685 | N/A | N/A | ACAATTAATGGCCTTA | 39 | I | 690 |
| 1242704 | 23285 | 23300 | N/A | N/A | TACATTATATGCCTCC | 11 | I | 691 |
| 1242728 | 23594 | 23609 | N/A | N/A | CATAGGTGAAGGTGCT | 26 | I | 692 |
| 1242752 | 23925 | 23940 | N/A | N/A | CCTATAGCATCTTTCT | 33 | I | 693 |
| 1242776 | 24181 | 24196 | N/A | N/A | GGTAAGATGAGGTTTA | 74 | I | 694 |
| 1242800 | 24507 | 24522 | N/A | N/A | AAGGGTAATACCCTAA | 78 | I | 695 |
| 1242824 | 25083 | 25098 | N/A | N/A | GTTTAGGCCGCTCTGT | 36 | I | 696 |
| 1242848 | 26000 | 26015 | N/A | N/A | ACGGATGGAAAATAGA | 49 | I | 697 |
| 1242872 | 26462 | 26477 | N/A | N/A | GATAAAGGCAATGGTG | 66 | I | 698 |
| 1242896 | 26796 | 26811 | N/A | N/A | GGGATATTATGCCCCA | 76 | I | 699 |
| 1242920 | 27179 | 27194 | N/A | N/A | ACAATATGCAGCCAGA | 35 | I | 700 |
| 1242944 | 27680 | 27695 | N/A | N/A | GATGAGATCAGGCACT | 44 | I | 701 |
| 1242968 | 28656 | 28671 | N/A | N/A | CTCGATTTCAACCAAT | 26 | I | 702 |
| 1242992 | 28914 | 28929 | N/A | N/A | TAAAGTTATGCAGGCT | 24 | I | 703 |
| 1243016 | 29240 | 29255 | N/A | N/A | GTAAAGCATGAACAGA | 36 | I | 704 |
| 1243040 | 29603 | 29618 | N/A | N/A | ACCTTTTAGTCTCATC | 29 | I | 705 |
| 1243064 | 31223 | 31238 | N/A | N/A | CTAAGATACAGATTAT | 59 | I | 706 |
| 1243088 | 31601 | 31616 | N/A | N/A | CTTAACCATCCCCCTA | 137 | I | 707 |
| 1243112 | 33369 | 33384 | N/A | N/A | AGTGATAAGAAGACGA | 63 | I | 708 |
| 1243136 | 33920 | 33935 | N/A | N/A | TGGGAATATTGGCTTG | 27 | I | 709 |
| 1243160 | 34243 | 34258 | N/A | N/A | TAACAAGAAGGTAGCC | 41 | I | 710 |
| 1243184 | 34430 | 34445 | N/A | N/A | ATGAAGCCCGAACCCC | 87 | I | 711 |
| 1243208 | 34637 | 34652 | N/A | N/A | TCATTTAGTCACTAAC | 86 | I | 712 |
| 1243232 | 7790 | 7805 | N/A | N/A | AACAGTTTGCCTCCAC | 50 | I | 713 |
| 1232737 | 5138 | 5153 | 90 | 105 | ATGCCATCTTGACCCA | 65 | J | 22 |
| 1241412 | 5062 | 5077 | 14 | 29 | TATTCCTCAACTTCAG | 57 | J | 714 |
| 1241436 | 5146 | 5161 | 98 | 113 | ACTTCACGATGCCATC | 45 | J | 715 |
| 1241460 | 5252 | 5267 | 204 | 219 | ATCCAGGAGTGTGTCC | 73 | J | 716 |
| 1241484 | 5689 | 5704 | 641 | 656 | CCACTTTGAGAGATAT | 59 | J | 717 |
| 1241508 | 5763 | 5778 | 715 | 730 | GGTCCTTAGGCTTCGG | 50 | J | 718 |
| 1241532 | 5897 | 5912 | 849 | 864 | GGATGCAGCCCTTCTG | 50 | J | 719 |
| 1241556 | 5972 | 5987 | 924 | 939 | CCTCCCCATTGAAGTC | 75 | J | 720 |
| 1241580 | 6022 | 6037 | 974 | 989 | TCTCCTGTTGATCGCA | 34 | J | 721 |
| 1241604 | 10251 | 10266 | 1051 | 1066 | ATCACAGTGGGATTCG | 50 | J | 722 |
| 1241628 | N/A | N/A | 1144 | 1159 | TTACGGTAATCTTTCT | 54 | J | 723 |
| 1241652 | 10890 | 10905 | 1193 | 1208 | CCTGTCTTCAATGCAC | 50 | J | 724 |
| 1241676 | 11097 | 11112 | 1400 | 1415 | CACCACGGTGTGCACA | 57 | J | 725 |
| 1241700 | 11301 | 11316 | 1604 | 1619 | CACGATCTTGTGGATG | 55 | J | 726 |
| 1241724 | 11438 | 11453 | 1741 | 1756 | CTGATGAGGCTGCTCA | 58 | J | 727 |
| 1241748 | 11736 | 11751 | 2039 | 2054 | GGATGTCTGGGCAAGG | 37 | J | 728 |
| 1241772 | 11948 | 11963 | 2251 | 2266 | AGGTTCATCCTCAGGA | 62 | J | 729 |
| 1241795 | 12147 | 12162 | 2450 | 2465 | CAAATACCCCTTTTCG | 41 | J | 730 |
| 1241819 | 12230 | 12245 | 2533 | 2548 | GAGATCTTGCAACTTA | 42 | J | 731 |
| 1241842 | 12362 | 12377 | 2665 | 2680 | CTTTGCACGAAGTCCT | 47 | J | 732 |
| 1241866 | 12467 | 12482 | 2770 | 2785 | GACAGTGACTCCACCC | 20 | J | 733 |
| 1241890 | 12542 | 12557 | 2845 | 2860 | TGCACCATATCAAGGT | 82 | J | 734 |
| 1241914 | 16589 | 16604 | 2907 | 2922 | TGAGGTGGCTGTTCAC | 56 | J | 735 |
| 1241938 | 16741 | 16756 | 3059 | 3074 | CCACAATCTCCGAATG | 69 | J | 736 |
| 1241962 | N/A | N/A | 3233 | 3248 | CAACCAGAGCTTCTTC | 83 | J | 737 |
| 1241986 | 23007 | 23022 | 3282 | 3297 | ATACTGATGCAAGATC | 53 | J | 738 |
| 1242010 | 23055 | 23070 | 3330 | 3345 | AGGCATTCTCCCCCAC | 45 | J | 739 |
| 1242034 | 23120 | 23135 | 3395 | 3410 | TTTCTGCAGGTTACAC | 67 | J | 740 |
| 1242058 | 31014 | 31029 | 3458 | 3473 | GCTGAGTACCGAGGAC | 38 | J | 741 |
| 1242082 | 31058 | 31073 | 3502 | 3517 | AGAGTGTTGCCTCGCA | 43 | J | 742 |
| 1242106 | 31125 | 31140 | 3569 | 3584 | CAACACCTGAAGCTTG | 77 | J | 743 |
| 1242130 | 31739 | 31754 | 3675 | 3690 | CCAGGTCATTGTTGCC | 61 | J | 744 |
| 1242154 | 35494 | 35509 | 3847 | 3862 | CACTCCTACCAAGAAG | 103 | J | 745 |
| 1242178 | 35697 | 35712 | 4050 | 4065 | TGTCCTGGTGTCTTCC | 57 | J | 746 |
| 1242202 | 35775 | 35790 | 4128 | 4143 | AGCTAATTACATGAGG | 37 | J | 747 |
| 1242226 | 35913 | 35928 | 4266 | 4281 | TTCTGTGTTATGGTCA | 77 | J | 748 |
| 1242250 | N/A | N/A | N/A | N/A | ATTCACCAACCAGAGC | 76 | J | 749 |
| 1242274 | 6769 | 6784 | N/A | N/A | GAGTATTTATACAGTC | 32 | J | 750 |
| 1242298 | 7874 | 7889 | N/A | N/A | TCAGATAAAGAGGGAC | 56 | J | 751 |
| 1242322 | 8599 | 8614 | N/A | N/A | GAGGGATAATACCAGA | 75 | J | 752 |
| 1242346 | 9503 | 9518 | N/A | N/A | GCATATCTTAAGAAGG | 68 | J | 753 |
| 1242370 | 10364 | 10379 | N/A | N/A | TCAACTAGAAGCACCA | 87 | J | 754 |
| 1242394 | 12707 | 12722 | N/A | N/A | CATTATGATGTAGCTG | 56 | J | 755 |
| 1242418 | 13119 | 13134 | N/A | N/A | CATGATTTGGCTCATA | 84 | J | 756 |
| 1242442 | 14481 | 14496 | N/A | N/A | GGTGCTGAGCCTCCTA | 19 | J | 757 |
| | 14627 | 14642 | | | | | | |
| | 14773 | 14788 | | | | | | |
| | 15065 | 15080 | | | | | | |
| 1242466 | 14546 | 14561 | N/A | N/A | GCCCCCTACCAGGGCT | 83 | J | 758 |
| | 15201 | 15216 | | | | | | |
| | 15274 | 15289 | | | | | | |
| 1242490 | 14590 | 14605 | N/A | N/A | GTCCTCAGAGTAAGGC | 44 | J | 759 |
| | 14882 | 14897 | | | | | | |
| | 15172 | 15187 | | | | | | |
| | 15245 | 15260 | | | | | | |
| 1242514 | 14704 | 14719 | N/A | N/A | AATGGGTGCTGAGCCC | 30 | J | 760 |
| | 14996 | 15011 | | | | | | |
| 1242538 | 17446 | 17461 | N/A | N/A | AGATTAACATTAGGTC | 30 | J | 761 |
| 1242562 | 18553 | 18568 | N/A | N/A | CAAACCCCATCCCCGG | 72 | J | 762 |
| 1242586 | 19665 | 19680 | N/A | N/A | ACAAATGGATCTCTAC | 50 | J | 763 |
| 1242610 | 20571 | 20586 | N/A | N/A | CCGGAATACAGCACAA | 65 | J | 764 |
| 1242634 | 20703 | 20718 | N/A | N/A | AGAGCTCCGGAATAGA | 60 | J | 765 |
| | 20745 | 20760 | | | | | | |
| | 20913 | 20928 | | | | | | |
| 1242658 | 21601 | 21616 | N/A | N/A | TATACAATATGAGGAC | 79 | J | 766 |
| 1242681 | 22672 | 22687 | N/A | N/A | GCACAATTAATGGCCT | 50 | J | 767 |
| 1242705 | 23288 | 23303 | N/A | N/A | GTATACATTATATGCC | 56 | J | 768 |
| 1242729 | 23595 | 23610 | N/A | N/A | ACATAGGTGAAGGTGC | 63 | J | 769 |
| 1242753 | 23928 | 23943 | N/A | N/A | TACCCTATAGCATCTT | 73 | J | 770 |
| 1242777 | 24183 | 24198 | N/A | N/A | CAGGTAAGATGAGGTT | 55 | J | 771 |
| 1242801 | 24508 | 24523 | N/A | N/A | GAAGGGTAATACCCTA | 77 | J | 772 |
| 1242825 | 25100 | 25115 | N/A | N/A | GGCAATAAACTCTTGT | 42 | J | 773 |
| 1242849 | 26065 | 26080 | N/A | N/A | GATACTCCCTTGGATG | 93 | J | 774 |
| 1242873 | 26544 | 26559 | N/A | N/A | CTAACATGACTTGTGT | 61 | J | 775 |
| 1242897 | 26798 | 26813 | N/A | N/A | ATGGGATATTATGCCC | 57 | J | 776 |
| 1242921 | 27180 | 27195 | N/A | N/A | CACAATATGCAGCCAG | 53 | J | 777 |
| 1242945 | 27770 | 27785 | N/A | N/A | CTAATTCATAGCTGGG | 80 | J | 778 |
| 1242969 | 28674 | 28689 | N/A | N/A | GAGGAATGTGATTGAC | 34 | J | 779 |
| 1242993 | 28915 | 28930 | N/A | N/A | TTAAAGTTATGCAGGC | 42 | J | 780 |
| 1243017 | 29241 | 29256 | N/A | N/A | AGTAAAGCATGAACAG | 75 | J | 781 |
| 1243041 | 29604 | 29619 | N/A | N/A | CACCTTTTAGTCTCAT | 42 | J | 782 |
| 1243065 | 31241 | 31256 | N/A | N/A | TAAGAAGACACCTCAC | 80 | J | 783 |
| 1243089 | 31602 | 31617 | N/A | N/A | CCTTAACCATCCCCCT | 93 | J | 784 |
| 1243113 | 33395 | 33410 | N/A | N/A | CATGAGTTTGTTGCTC | 52 | J | 785 |
| 1243137 | 33957 | 33972 | N/A | N/A | ACCAATCCTTTGTTTG | 72 | J | 786 |
| 1243161 | 34244 | 34259 | N/A | N/A | ATAACAAGAAGGTAGC | 48 | J | 787 |
| 1243185 | 34431 | 34446 | N/A | N/A | GATGAAGCCCGAACCC | 53 | J | 788 |
| 1243209 | 34639 | 34654 | N/A | N/A | GTTCATTTAGTCACTA | 36 | J | 789 |
| 1243233 | 32160 | 32175 | N/A | N/A | CCCACTATGTAAAGAC | 74 | J | 790 |
| 1232737 | 5138 | 5153 | 90 | 105 | ATGCCATCTTGACCCA | 56 | K | 22 |
| 1241413 | 5067 | 5082 | 19 | 34 | TTCACTATTCCTCAAC | 77 | K | 791 |
| 1241437 | 5149 | 5164 | 101 | 116 | ACCACTTCACGATGCC | 52 | K | 792 |
| 1241461 | 5253 | 5268 | 205 | 220 | GATCCAGGAGTGTGTC | 72 | K | 793 |
| 1241485 | 5690 | 5705 | 642 | 657 | TCCACTTTGAGAGATA | 69 | K | 794 |
| 1241509 | 5765 | 5780 | 717 | 732 | AGGGTCCTTAGGCTTC | 72 | K | 795 |
| 1241533 | 5898 | 5913 | 850 | 865 | GGGATGCAGCCCTTCT | 71 | K | 796 |
| 1241557 | 5973 | 5988 | 925 | 940 | TCCTCCCCATTGAAGT | 96 | K | 797 |
| 1241581 | 6023 | 6038 | 975 | 990 | CTCTCCTGTTGATCGC | 47 | K | 798 |
| 1241605 | 10254 | 10269 | 1054 | 1069 | CATATCACAGTGGGAT | 63 | K | 799 |
| 1241629 | N/A | N/A | 1145 | 1160 | CTTACGGTAATCTTTC | 54 | K | 800 |
| 1241653 | 10891 | 10906 | 1194 | 1209 | TCCTGTCTTCAATGCA | 48 | K | 801 |
| 1241677 | 11103 | 11118 | 1406 | 1421 | CTGGAACACCACGGTG | 76 | K | 802 |
| 1241701 | 11302 | 11317 | 1605 | 1620 | TCACGATCTTGTGGAT | 50 | K | 803 |
| 1241725 | 11469 | 11484 | 1772 | 1787 | GAGCAGAGAGGCCTCG | 70 | K | 804 |
| 1241749 | 11737 | 11752 | 2040 | 2055 | TGGATGTCTGGGCAAG | 40 | K | 805 |
| 1241773 | 11950 | 11965 | 2253 | 2268 | ACAGGTTCATCCTCAG | 36 | K | 806 |
| 1241796 | 12149 | 12164 | 2452 | 2467 | ATCAAATACCCCTTTT | 60 | K | 807 |
| 1241820 | 12231 | 12246 | 2534 | 2549 | AGAGATCTTGCAACTT | 40 | K | 808 |
| 1241843 | 12363 | 12378 | 2666 | 2681 | CCTTTGCACGAAGTCC | 30 | K | 809 |
| 1241867 | 12475 | 12490 | 2778 | 2793 | ACCCCAGGGACAGTGA | 37 | K | 810 |
| 1241891 | 12543 | 12558 | 2846 | 2861 | CTGCACCATATCAAGG | 85 | K | 811 |
| 1241915 | 16592 | 16607 | 2910 | 2925 | AAGTGAGGTGGCTGTT | 70 | K | 812 |
| 1241939 | 16742 | 16757 | 3060 | 3075 | ACCACAATCTCCGAAT | 92 | K | 813 |
| 1241963 | N/A | N/A | 3236 | 3251 | GACCAACCAGAGCTTC | 69 | K | 814 |
| 1241987 | 23012 | 23027 | 3287 | 3302 | GCTCAATACTGATGCA | 89 | K | 815 |
| 1242011 | 23057 | 23072 | 3332 | 3347 | CAAGGCATTCTCCCCC | 42 | K | 816 |
| 1242035 | 23121 | 23136 | 3396 | 3411 | GTTTCTGCAGGTTACA | 72 | K | 817 |
| 1242059 | 31015 | 31030 | 3459 | 3474 | TGCTGAGTACCGAGGA | 41 | K | 818 |
| 1242083 | 31060 | 31075 | 3504 | 3519 | CGAGAGTGTTGCCTCG | 103 | K | 819 |
| 1242107 | 31126 | 31141 | 3570 | 3585 | CCAACACCTGAAGCTT | 53 | K | 820 |
| 1242131 | 31740 | 31755 | 3676 | 3691 | CCCAGGTCATTGTTGC | 62 | K | 821 |
| 1242155 | 35500 | 35515 | 3853 | 3868 | CGTTTCCACTCCTACC | 75 | K | 822 |
| 1242179 | 35702 | 35717 | 4055 | 4070 | GTCATTGTCCTGGTGT | 45 | K | 823 |
| 1242203 | 35776 | 35791 | 4129 | 4144 | GAGCTAATTACATGAG | 56 | K | 824 |
| 1242227 | 35914 | 35929 | 4267 | 4282 | GTTCTGTGTTATGGTC | 80 | K | 825 |
| 1242251 | N/A | N/A | N/A | N/A | AATTCACCAACCAGAG | 91 | K | 826 |
| 1242275 | 6782 | 6797 | N/A | N/A | ATATGGTACCATGGAG | 56 | K | 827 |
| 1242299 | 8091 | 8106 | N/A | N/A | GGATTAAGAGAATTTC | 107 | K | 828 |
| 1242323 | 8638 | 8653 | N/A | N/A | AGTTAGGATCTCTTCC | 66 | K | 829 |
| 1242347 | 9507 | 9522 | N/A | N/A | GATAGCATATCTTAAG | 66 | K | 830 |
| 1242371 | 10428 | 10443 | N/A | N/A | TATAGTATGGCCAAGT | 82 | K | 831 |
| 1242395 | 12709 | 12724 | N/A | N/A | GGCATTATGATGTAGC | 55 | K | 832 |
| 1242419 | 13178 | 13193 | N/A | N/A | CCAAGGAAACTGTGTC | 36 | K | 833 |
| 1242443 | 14484 | 14499 | N/A | N/A | ATGGGTGCTGAGCCTC | 19 | K | 834 |
| | 14630 | 14645 | | | | | | |
| | 14776 | 14791 | | | | | | |
| | 15068 | 15083 | | | | | | |
| 1242467 | 14548 | 14563 | N/A | N/A | GAGCCCCCTACCAGGG | 70 | K | 835 |
| | 15130 | 15145 | | | | | | |
| | 15203 | 15218 | | | | | | |
| | 15276 | 15291 | | | | | | |
| 1242491 | 14591 | 14606 | N/A | N/A | TGTCCTCAGAGTAAGG | 33 | K | 836 |
| | 14883 | 14898 | | | | | | |
| | 15173 | 15188 | | | | | | |
| | 15246 | 15261 | | | | | | |
| 1242515 | 14924 | 14939 | N/A | N/A | AAATGGTTGCTGAGCC | 59 | K | 837 |
| 1242539 | 17447 | 17462 | N/A | N/A | TAGATTAACATTAGGT | 45 | K | 838 |
| 1242563 | 18555 | 18570 | N/A | N/A | CGCAAACCCCATCCCC | 69 | K | 839 |
| 1242587 | 19666 | 19681 | N/A | N/A | GACAAATGGATCTCTA | 38 | K | 840 |
| 1242611 | 20578 | 20593 | N/A | N/A | GAGAGCTCCGGAATAC | 50 | K | 841 |
| | 20956 | 20971 | | | | | | |
| 1242635 | 20704 | 20719 | N/A | N/A | GAGAGCTCCGGAATAG | 55 | K | 842 |
| | 20746 | 20761 | | | | | | |
| | 20914 | 20929 | | | | | | |
| 1242659 | 21603 | 21618 | N/A | N/A | CTTATACAATATGAGG | 45 | K | 843 |
| 1242682 | 22760 | 22775 | N/A | N/A | ATACTACATCTTCCCA | 68 | K | 844 |
| 1242706 | 23301 | 23316 | N/A | N/A | CTTATTAGCAGCAGTA | 35 | K | 845 |
| 1242730 | 23596 | 23611 | N/A | N/A | TACATAGGTGAAGGTG | 74 | K | 846 |
| 1242754 | 23987 | 24002 | N/A | N/A | AAGTTATGAGGCTCCC | 68 | K | 847 |
| 1242778 | 24214 | 24229 | N/A | N/A | TTCAAAACTGCCTAGT | 92 | K | 848 |
| 1242802 | 24510 | 24525 | N/A | N/A | AGGAAGGGTAATACCC | 63 | K | 849 |
| 1242826 | 25101 | 25116 | N/A | N/A | AGGCAATAAACTCTTG | 72 | K | 850 |
| 1242850 | 26088 | 26103 | N/A | N/A | CCAATATATGTTCACA | 57 | K | 851 |
| 1242874 | 26547 | 26562 | N/A | N/A | AATCTAACATGACTTG | 73 | K | 852 |
| 1242898 | 26813 | 26828 | N/A | N/A | ATGGTAAAGCACACTA | 46 | K | 853 |
| 1242922 | 27198 | 27213 | N/A | N/A | GTATTGAGACAGGCAG | 36 | K | 854 |
| 1242946 | 27788 | 27803 | N/A | N/A | CACCAAGATGTTTCAA | 57 | K | 855 |
| 1242970 | 28688 | 28703 | N/A | N/A | CAATCCTTGGATTAGA | 71 | K | 856 |
| 1242994 | 28916 | 28931 | N/A | N/A | ATTAAAGTTATGCAGG | 61 | K | 857 |
| 1243018 | 29243 | 29258 | N/A | N/A | ACAGTAAAGCATGAAC | 78 | K | 858 |
| 1243042 | 29690 | 29705 | N/A | N/A | GAAATCTAAGGCTTAT | 64 | K | 859 |
| 1243066 | 31242 | 31257 | N/A | N/A | CTAAGAAGACACCTCA | 71 | K | 860 |
| 1243090 | 31878 | 31893 | N/A | N/A | GATTTTGATAACAGTC | 49 | K | 861 |
| 1243114 | 33471 | 33486 | N/A | N/A | CAGAATAAGCAAGGGT | 92 | K | 862 |
| 1243138 | 33958 | 33973 | N/A | N/A | GACCAATCCTTTGTTT | 97 | K | 863 |
| 1243162 | 34245 | 34260 | N/A | N/A | CATAACAAGAAGGTAG | 70 | K | 864 |
| 1243186 | 34434 | 34449 | N/A | N/A | CATGATGAAGCCCGAA | 85 | K | 865 |
| 1243210 | 34682 | 34697 | N/A | N/A | CATTTACGCTTCCTCA | 67 | K | 866 |
| 1243234 | 26441 | 26456 | N/A | N/A | GAGGCATCTACAGGTC | 61 | K | 867 |
| 1004826 | 11973 | 11988 | 2276 | 2291 | CTCGCAGTCCACTTCC | 68 | L | 868 |
| 1004847 | 12233 | 12248 | 2536 | 2551 | TGAGAGATCTTGCAAC | 69 | L | 869 |
| 1232737 | 5138 | 5153 | 90 | 105 | ATGCCATCTTGACCCA | 57 | L | 22 |
| 1241414 | 5072 | 5087 | 24 | 39 | AACTCTTCACTATTCC | 53 | L | 870 |
| 1241438 | 5150 | 5165 | 102 | 117 | AACCACTTCACGATGC | 60 | L | 871 |
| 1241462 | 5255 | 5270 | 207 | 222 | TCGATCCAGGAGTGTG | 70 | L | 872 |
| 1241486 | 5691 | 5706 | 643 | 658 | CTCCACTTTGAGAGAT | 65 | L | 873 |
| 1241510 | 5766 | 5781 | 718 | 733 | CAGGGTCCTTAGGCTT | 64 | L | 874 |
| 1241534 | 5914 | 5929 | 866 | 881 | CTGACCCCTCGGGAGG | 74 | L | 875 |
| 1241558 | 5975 | 5990 | 927 | 942 | TCTCCTCCCCATTGAA | 70 | L | 876 |
| 1241582 | 6024 | 6039 | 976 | 991 | TCTCTCCTGTTGATCG | 42 | L | 877 |
| 1241606 | 10255 | 10270 | 1055 | 1070 | GCATATCACAGTGGGA | 59 | L | 878 |
| 1241630 | N/A | N/A | 1146 | 1161 | TCTTACGGTAATCTTT | 58 | L | 879 |
| 1241654 | 10899 | 10914 | 1202 | 1217 | ACGGGCATTCCTGTCT | 67 | L | 880 |
| 1241678 | 11106 | 11121 | 1409 | 1424 | CCCCTGGAACACCACG | 62 | L | 881 |
| 1241702 | 11304 | 11319 | 1607 | 1622 | TCTCACGATCTTGTGG | 55 | L | 882 |
| 1241726 | 11493 | 11508 | 1796 | 1811 | CAGGGCCACAGGTCTC | 56 | L | 883 |
| 1241750 | 11817 | 11832 | 2120 | 2135 | GCAGAGGCCGTGCTCC | 56 | L | 884 |
| 1241797 | 12150 | 12165 | 2453 | 2468 | AATCAAATACCCCTTT | 65 | L | 885 |
| 1241844 | 12369 | 12384 | 2672 | 2687 | CATGGCCCTTTGCACG | 50 | L | 886 |
| 1241868 | 12486 | 12501 | 2789 | 2804 | GTTATGGAGAAACCCC | 30 | L | 887 |
| 1241892 | 12545 | 12560 | 2848 | 2863 | CACTGCACCATATCAA | 73 | L | 888 |
| 1241916 | 16593 | 16608 | 2911 | 2926 | GAAGTGAGGTGGCTGT | 56 | L | 889 |
| 1241940 | N/A | N/A | 3061 | 3076 | AACCACAATCTCCGAA | 72 | L | 890 |
| 1241964 | 22970 | 22985 | 3245 | 3260 | GCAGCAGCTGACCAAC | 65 | L | 891 |
| 1241988 | 23013 | 23028 | 3288 | 3303 | TGCTCAATACTGATGC | 57 | L | 892 |
| 1242012 | 23061 | 23076 | 3336 | 3351 | CTCCCAAGGCATTCTC | 72 | L | 893 |
| 1242036 | 23122 | 23137 | 3397 | 3412 | AGTTTCTGCAGGTTAC | 59 | L | 894 |
| 1242060 | 31016 | 31031 | 3460 | 3475 | GTGCTGAGTACCGAGG | 39 | L | 895 |
| 1242084 | 31061 | 31076 | 3505 | 3520 | CCGAGAGTGTTGCCTC | 49 | L | 896 |
| 1242108 | N/A | N/A | 3572 | 3587 | TTCCAACACCTGAAGC | 63 | L | 897 |
| 1242132 | 31741 | 31756 | 3677 | 3692 | GCCCAGGTCATTGTTG | 87 | L | 898 |
| 1242156 | 35501 | 35516 | 3854 | 3869 | CCGTTTCCACTCCTAC | 48 | L | 899 |
| 1242180 | 35703 | 35718 | 4056 | 4071 | TGTCATTGTCCTGGTG | 51 | L | 900 |
| 1242204 | 35787 | 35802 | 4140 | 4155 | CTTTATTGAATGAGCT | 43 | L | 901 |
| 1242228 | 35915 | 35930 | 4268 | 4283 | AGTTCTGTGTTATGGT | 76 | L | 902 |
| 1242252 | N/A | N/A | N/A | N/A | GAATTCACCAACCAGA | 63 | L | 903 |
| 1242276 | 6783 | 6798 | N/A | N/A | TATATGGTACCATGGA | 59 | L | 904 |
| 1242300 | 8092 | 8107 | N/A | N/A | GGGATTAAGAGAATTT | 95 | L | 905 |
| 1242324 | 8640 | 8655 | N/A | N/A | CCAGTTAGGATCTCTT | 46 | L | 906 |
| 1242348 | 9510 | 9525 | N/A | N/A | CTAGATAGCATATCTT | 75 | L | 907 |
| 1242372 | 10429 | 10444 | N/A | N/A | CTATAGTATGGCCAAG | 74 | L | 908 |
| 1242396 | 12710 | 12725 | N/A | N/A | TGGCATTATGATGTAG | 59 | L | 909 |
| 1242420 | 13215 | 13230 | N/A | N/A | CTCTATTTCCCTTGAT | 72 | L | 910 |
| 1242444 | 14485 | 14500 | N/A | N/A | AATGGGTGCTGAGCCT | 24 | L | 911 |
| | 14631 | 14646 | | | | | | |
| | 14777 | 14792 | | | | | | |
| | 15069 | 15084 | | | | | | |
| 1242468 | 14549 | 14564 | N/A | N/A | TGAGCCCCCTACCAGG | 55 | L | 912 |
| | 15131 | 15146 | | | | | | |
| | 15204 | 15219 | | | | | | |
| | 15277 | 15292 | | | | | | |
| 1242492 | 14592 | 14607 | N/A | N/A | CTGTCCTCAGAGTAAG | 42 | L | 913 |
| | 14884 | 14899 | | | | | | |
| | 15174 | 15189 | | | | | | |
| | 15247 | 15262 | | | | | | |
| 1242516 | 15111 | 15126 | N/A | N/A | CAGTCAGAGTCTGTCC | 13 | L | 914 |
| | 15257 | 15272 | | | | | | |
| 1242540 | 17448 | 17463 | N/A | N/A | CTAGATTAACATTAGG | 58 | L | 915 |
| 1242564 | 18568 | 18583 | N/A | N/A | CAAGACAAACAAACGC | 40 | L | 916 |
| 1242588 | 19721 | 19736 | N/A | N/A | CCTGTTAGACCACCTT | 28 | L | 917 |
| 1242612 | 20580 | 20595 | N/A | N/A | CAGAGAGCTCCGGAAT | 58 | L | 918 |
| | 20706 | 20721 | | | | | | |
| | 20748 | 20763 | | | | | | |
| | 20916 | 20931 | | | | | | |
| | 20958 | 20973 | | | | | | |
| 1242636 | 20775 | 20790 | N/A | N/A | TAGAGAATGCATCAGG | 52 | L | 919 |
| 1242660 | 21636 | 21651 | N/A | N/A | ATCGAGGGTCTGCATT | 65 | L | 920 |
| 1242683 | 22762 | 22777 | N/A | N/A | CAATACTACATCTTCC | 77 | L | 921 |
| 1242707 | 23305 | 23320 | N/A | N/A | TTATCTTATTAGCAGC | 27 | L | 922 |
| 1242731 | 23598 | 23613 | N/A | N/A | GCTACATAGGTGAAGG | 56 | L | 923 |
| 1242755 | 23988 | 24003 | N/A | N/A | AAAGTTATGAGGCTCC | 54 | L | 924 |
| 1242779 | 24216 | 24231 | N/A | N/A | GATTCAAAACTGCCTA | 60 | L | 925 |
| 1242803 | 24535 | 24550 | N/A | N/A | AGTAATATTCTAAGGC | 60 | L | 926 |
| 1242827 | 25189 | 25204 | N/A | N/A | TAAAGTAAGGACTGGG | 62 | L | 927 |
| 1242851 | 26100 | 26115 | N/A | N/A | CATAATTAGCAACCAA | 70 | L | 928 |
| 1242875 | 26549 | 26564 | N/A | N/A | CAAATCTAACATGACT | 63 | L | 929 |
| 1242899 | 26815 | 26830 | N/A | N/A | TTATGGTAAAGCACAC | 51 | L | 930 |
| 1242923 | 27201 | 27216 | N/A | N/A | GCAGTATTGAGACAGG | 30 | L | 931 |
| 1242947 | 27800 | 27815 | N/A | N/A | GATTAAAAGAACCACC | 72 | L | 932 |
| 1242971 | 28690 | 28705 | N/A | N/A | ACCAATCCTTGGATTA | 76 | L | 933 |
| 1242995 | 28978 | 28993 | N/A | N/A | ATTCTAGTAGAATGGG | 70 | L | 934 |
| 1243019 | 29360 | 29375 | N/A | N/A | AGGAATAGCGCAGGTG | 54 | L | 935 |
| 1243043 | 29723 | 29738 | N/A | N/A | CAGCTAAAACTATTAC | 80 | L | 936 |
| 1243067 | 31243 | 31258 | N/A | N/A | ACTAAGAAGACACCTC | 85 | L | 937 |
| 1243091 | 31879 | 31894 | N/A | N/A | GGATTTTGATAACAGT | 45 | L | 938 |
| 1243115 | 33472 | 33487 | N/A | N/A | GCAGAATAAGCAAGGG | 79 | L | 939 |
| 1243139 | 33985 | 34000 | N/A | N/A | ATGTAGCAGTGTCCCC | 53 | L | 940 |
| 1243163 | 34312 | 34327 | N/A | N/A | GATATCAGAGAGTTTG | 63 | L | 941 |
| 1243187 | 34435 | 34450 | N/A | N/A | CCATGATGAAGCCCGA | 47 | L | 942 |
| 1243211 | 34684 | 34699 | N/A | N/A | AGCATTTACGCTTCCT | 55 | L | 943 |
| 1243235 | 29510 | 29525 | N/A | N/A | AAATGCATCAATCTCG | 53 | L | 944 |
| 1232737 | 5138 | 5153 | 90 | 105 | ATGCCATCTTGACCCA | 85 | M | 22 |
| 1241415 | 5076 | 5091 | 28 | 43 | GACAAACTCTTCACTA | 64 | M | 945 |
| 1241439 | 5151 | 5166 | 103 | 118 | CAACCACTTCACGATG | 56 | M | 946 |
| 1241463 | 5261 | 5276 | 213 | 228 | GTTGGCTCGATCCAGG | 72 | M | 947 |
| 1241487 | 5695 | 5710 | 647 | 662 | AAGTCTCCACTTTGAG | 65 | M | 948 |
| 1241511 | 5769 | 5784 | 721 | 736 | TTTCAGGGTCCTTAGG | 62 | M | 949 |
| 1241535 | 5915 | 5930 | 867 | 882 | TCTGACCCCTCGGGAG | 77 | M | 950 |
| 1241559 | 5985 | 6000 | 937 | 952 | GCCCACGCCTTCTCCT | 67 | M | 951 |
| 1241583 | 6028 | 6043 | 980 | 995 | AAGGTCTCTCCTGTTG | 56 | M | 952 |
| 1241607 | 10257 | 10272 | 1057 | 1072 | TGGCATATCACAGTGG | 40 | M | 953 |
| 1241631 | N/A | N/A | 1147 | 1162 | TTCTTACGGTAATCTT | 38 | M | 954 |
| 1241655 | 10901 | 10916 | 1204 | 1219 | AGACGGGCATTCCTGT | 53 | M | 955 |
| 1241679 | 11107 | 11122 | 1410 | 1425 | CCCCCTGGAACACCAC | 47 | M | 956 |
| 1241703 | 11307 | 11322 | 1610 | 1625 | TTTTCTCACGATCTTG | 32 | M | 957 |
| 1241727 | 11511 | 11526 | 1814 | 1829 | CAAGTGCTGCAGTTTC | 76 | M | 958 |
| 1241751 | 11818 | 11833 | 2121 | 2136 | CGCAGAGGCCGTGCTC | 70 | M | 959 |
| 1241774 | 11977 | 11992 | 2280 | 2295 | ACTTCTCGCAGTCCAC | 31 | M | 960 |
| 1241798 | 12161 | 12176 | 2464 | 2479 | CGTACAACAAAAATCA | 52 | M | 961 |
| 1241821 | 12234 | 12249 | 2537 | 2552 | CTGAGAGATCTTGCAA | 43 | M | 962 |
| 1241845 | 12372 | 12387 | 2675 | 2690 | GTCCATGGCCCTTTGC | 49 | M | 963 |
| 1241869 | 12488 | 12503 | 2791 | 2806 | ATGTTATGGAGAAACC | 59 | M | 964 |
| 1241893 | 12546 | 12561 | 2849 | 2864 | ACACTGCACCATATCA | 56 | M | 965 |
| 1241917 | 16595 | 16610 | 2913 | 2928 | TGGAAGTGAGGTGGCT | 56 | M | 966 |
| 1241941 | N/A | N/A | 3062 | 3077 | CAACCACAATCTCCGA | 62 | M | 967 |
| 1241965 | 22971 | 22986 | 3246 | 3261 | GGCAGCAGCTGACCAA | 46 | M | 968 |
| 1241989 | 23014 | 23029 | 3289 | 3304 | GTGCTCAATACTGATG | 44 | M | 969 |
| 1242013 | 23063 | 23078 | 3338 | 3353 | GTCTCCCAAGGCATTC | 46 | M | 970 |
| 1242037 | 23123 | 23138 | 3398 | 3413 | CAGTTTCTGCAGGTTA | 34 | M | 971 |
| 1242061 | 31017 | 31032 | 3461 | 3476 | AGTGCTGAGTACCGAG | 33 | M | 972 |
| 1242085 | 31065 | 31080 | 3509 | 3524 | GTCTCCGAGAGTGTTG | 46 | M | 973 |
| 1242109 | N/A | N/A | 3578 | 3593 | GTCTAATTCCAACACC | 41 | M | 974 |
| 1242133 | 31742 | 31757 | 3678 | 3693 | CGCCCAGGTCATTGTT | 80 | M | 975 |
| 1242157 | 35531 | 35546 | 3884 | 3899 | GGGACCGGAGAACACT | 82 | M | 976 |
| 1242181 | 35705 | 35720 | 4058 | 4073 | GCTGTCATTGTCCTGG | 48 | M | 977 |
| 1242205 | 35788 | 35803 | 4141 | 4156 | GCTTTATTGAATGAGC | 65 | M | 978 |
| 1242229 | 35916 | 35931 | 4269 | 4284 | TAGTTCTGTGTTATGG | 72 | M | 979 |
| 1242253 | 3156 | 3171 | N/A | N/A | GCTAGAGAGGAAATGC | 106 | M | 980 |
| 1242277 | 6784 | 6799 | N/A | N/A | GTATATGGTACCATGG | 58 | M | 981 |
| 1242301 | 8121 | 8136 | N/A | N/A | GAAAGAACCTTATCCC | 63 | M | 982 |
| 1242325 | 8652 | 8667 | N/A | N/A | ATAAACCATGGGCCAG | 61 | M | 983 |
| 1242349 | 9511 | 9526 | N/A | N/A | ACTAGATAGCATATCT | 63 | M | 984 |
| 1242373 | 10430 | 10445 | N/A | N/A | CCTATAGTATGGCCAA | 63 | M | 985 |
| 1242397 | 12754 | 12769 | N/A | N/A | ATACATCAATCTTTGC | 51 | M | 986 |
| 1242421 | 13226 | 13241 | N/A | N/A | CCACATTTCTGCTCTA | 48 | M | 987 |
| 1242445 | 14491 | 14506 | N/A | N/A | TAGAGAAATGGGTGCT | 18 | M | 988 |
| | 14637 | 14652 | | | | | | |
| | 14710 | 14725 | | | | | | |
| | 14783 | 14798 | | | | | | |
| | 15002 | 15017 | | | | | | |
| | 15075 | 15090 | | | | | | |
| 1242469 | 14550 | 14565 | N/A | N/A | CTGAGCCCCCTACCAG | 58 | M | 989 |
| | 15132 | 15147 | | | | | | |
| | 15205 | 15220 | | | | | | |
| | 15278 | 15293 | | | | | | |
| 1242493 | 14594 | 14609 | N/A | N/A | GTCTGTCCTCAGAGTA | 12 | M | 990 |
| | 14886 | 14901 | | | | | | |
| | 15176 | 15191 | | | | | | |
| | 15249 | 15264 | | | | | | |
| 1242517 | 15112 | 15127 | N/A | N/A | CCAGTCAGAGTCTGTC | 16 | M | 991 |
| | 15258 | 15273 | | | | | | |
| 1242541 | 17449 | 17464 | N/A | N/A | ACTAGATTAACATTAG | 49 | M | 992 |
| 1242565 | 18603 | 18618 | N/A | N/A | CTAAGATGTCTGTCCA | 42 | M | 993 |
| 1242589 | 19738 | 19753 | N/A | N/A | GTTCATAGGTCCTGGA | 37 | M | 994 |
| 1242613 | 20581 | 20596 | N/A | N/A | CCAGAGAGCTCCGGAA | 38 | M | 995 |
| | 20707 | 20722 | | | | | | |
| | 20749 | 20764 | | | | | | |
| | 20917 | 20932 | | | | | | |
| 1242637 | 20776 | 20791 | N/A | N/A | ATAGAGAATGCATCAG | 55 | M | 996 |
| 1242661 | 21643 | 21658 | N/A | N/A | ATACAACATCGAGGGT | 39 | M | 997 |
| 1242684 | 22763 | 22778 | N/A | N/A | CCAATACTACATCTTC | 80 | M | 998 |
| 1242708 | 23336 | 23351 | N/A | N/A | CTCTAGTTCTATAATC | 73 | M | 999 |
| 1242732 | 23632 | 23647 | N/A | N/A | CTAACAAACCAGCCTG | 64 | M | 1000 |
| 1242756 | 23989 | 24004 | N/A | N/A | CAAAGTTATGAGGCTC | 60 | M | 1001 |
| 1242780 | 24236 | 24251 | N/A | N/A | GATATTATTGTCAGAA | 36 | M | 1002 |
| 1242804 | 24553 | 24568 | N/A | N/A | GTCAAATTGCCAAGGA | 28 | M | 1003 |
| 1242828 | 25190 | 25205 | N/A | N/A | CTAAAGTAAGGACTGG | 43 | M | 1004 |
| 1242852 | 26101 | 26116 | N/A | N/A | CCATAATTAGCAACCA | 49 | M | 1005 |
| 1242876 | 26550 | 26565 | N/A | N/A | ACAAATCTAACATGAC | 78 | M | 1006 |
| 1242900 | 26817 | 26832 | N/A | N/A | AATTATGGTAAAGCAC | 80 | M | 1007 |
| 1242924 | 27251 | 27266 | N/A | N/A | GTATGATAATTAAACC | 101 | M | 1008 |
| 1242948 | 27801 | 27816 | N/A | N/A | AGATTAAAAGAACCAC | 80 | M | 1009 |
| 1242972 | 28710 | 28725 | N/A | N/A | CAAACAACCATGTCCC | 37 | M | 1010 |
| 1242996 | 29010 | 29025 | N/A | N/A | GATTAGTAGCATTCCT | 98 | M | 1011 |
| 1243020 | 29362 | 29377 | N/A | N/A | CCAGGAATAGCGCAGG | 47 | M | 1012 |
| 1243044 | 29750 | 29765 | N/A | N/A | TTATATCAACCTGGCA | 47 | M | 1013 |
| 1243068 | 31244 | 31259 | N/A | N/A | CACTAAGAAGACACCT | 86 | M | 1014 |
| 1243092 | 31919 | 31934 | N/A | N/A | CCTAATCTTGAGTGGC | 73 | M | 1015 |
| 1243116 | 33588 | 33603 | N/A | N/A | GGAATAATGCAGGTGG | 76 | M | 1016 |
| 1243140 | 33986 | 34001 | N/A | N/A | CATGTAGCAGTGTCCC | 45 | M | 1017 |
| 1243164 | 34321 | 34336 | N/A | N/A | TACAGGAGAGATATCA | 90 | M | 1018 |
| 1243188 | 34441 | 34456 | N/A | N/A | CAATTCCCATGATGAA | 71 | M | 1019 |
| 1243212 | 34685 | 34700 | N/A | N/A | CAGCATTTACGCTTCC | 52 | M | 1020 |
| 1243236 | 17707 | 17722 | N/A | N/A | TCCAACTCTCATCTAT | 61 | M | 1021 |
| 1232737 | 5138 | 5153 | 90 | 105 | ATGCCATCTTGACCCA | 59 | N | 22 |
| 1241416 | 5077 | 5092 | 29 | 44 | GGACAAACTCTTCACT | 48 | N | 1022 |
| 1241440 | 5154 | 5169 | 106 | 121 | GAACAACCACTTCACG | 76 | N | 1023 |
| 1241464 | 5262 | 5277 | 214 | 229 | TGTTGGCTCGATCCAG | 77 | N | 1024 |
| 1241488 | 5712 | 5727 | 664 | 679 | CGGATGAGTCTTTTTT | 38 | N | 1025 |
| 1241512 | 5771 | 5786 | 723 | 738 | GTTTTCAGGGTCCTTA | 62 | N | 1026 |
| 1241536 | 5916 | 5931 | 868 | 883 | GTCTGACCCCTCGGGA | 62 | N | 1027 |
| 1241560 | 5988 | 6003 | 940 | 955 | ATGGCCCACGCCTTCT | 62 | N | 1028 |
| 1241584 | 6030 | 6045 | 982 | 997 | TAAAGGTCTCTCCTGT | 61 | N | 1029 |
| 1241608 | 10262 | 10277 | 1062 | 1077 | CTTCCTGGCATATCAC | 37 | N | 1030 |
| 1241632 | 10845 | 10860 | 1148 | 1163 | CTTCTTACGGTAATCT | 45 | N | 1031 |
| 1241656 | 10902 | 10917 | 1205 | 1220 | CAGACGGGCATTCCTG | 51 | N | 1032 |
| 1241680 | 11108 | 11123 | 1411 | 1426 | GCCCCCTGGAACACCA | 50 | N | 1033 |
| 1241704 | 11310 | 11325 | 1613 | 1628 | GGGTTTTCTCACGATC | 36 | N | 1034 |
| 1241728 | 11512 | 11527 | 1815 | 1830 | GCAAGTGCTGCAGTTT | 58 | N | 1035 |
| 1241752 | 11819 | 11834 | 2122 | 2137 | GCGCAGAGGCCGTGCT | 96 | N | 1036 |
| 1241775 | 11978 | 11993 | 2281 | 2296 | AACTTCTCGCAGTCCA | 25 | N | 1037 |
| 1241799 | 12180 | 12195 | 2483 | 2498 | TACCAGGCCAAAGAGG | 84 | N | 1038 |
| 1241822 | 12244 | 12259 | 2547 | 2562 | GCCTGATTTGCTGAGA | 38 | N | 1039 |
| 1241846 | 12374 | 12389 | 2677 | 2692 | TAGTCCATGGCCCTTT | 47 | N | 1040 |
| 1241870 | 12489 | 12504 | 2792 | 2807 | CATGTTATGGAGAAAC | 77 | N | 1041 |
| 1241894 | 12547 | 12562 | 2850 | 2865 | CACACTGCACCATATC | 57 | N | 1042 |
| 1241918 | 16596 | 16611 | 2914 | 2929 | CTGGAAGTGAGGTGGC | 60 | N | 1043 |
| 1241942 | N/A | N/A | 3063 | 3078 | CCAACCACAATCTCCG | 83 | N | 1044 |
| 1241966 | 22982 | 22997 | 3257 | 3272 | TGCTGATGTGAGGCAG | 59 | N | 1045 |
| 1241990 | 23015 | 23030 | 3290 | 3305 | GGTGCTCAATACTGAT | 54 | N | 1046 |
| 1242014 | 23065 | 23080 | 3340 | 3355 | GAGTCTCCCAAGGCAT | 40 | N | 1047 |
| 1242038 | 23124 | 23139 | 3399 | 3414 | CCAGTTTCTGCAGGTT | 43 | N | 1048 |
| 1242062 | 31018 | 31033 | 3462 | 3477 | TAGTGCTGAGTACCGA | 36 | N | 1049 |
| 1242086 | 31066 | 31081 | 3510 | 3525 | TGTCTCCGAGAGTGTT | 39 | N | 1050 |
| 1242110 | 31651 | 31666 | 3587 | 3602 | GTTGCAGTTGTCTAAT | 61 | N | 1051 |
| 1242134 | 31756 | 31771 | 3692 | 3707 | CATGACCCCCAGGTCG | 59† | N | 1052 |
| 1242158 | 35538 | 35553 | 3891 | 3906 | AGCTGGAGGGACCGGA | 110 | N | 1053 |
| 1242182 | 35711 | 35726 | 4064 | 4079 | CCCGATGCTGTCATTG | 51 | N | 1054 |
| 1242206 | 35789 | 35804 | 4142 | 4157 | TGCTTTATTGAATGAG | 29 | N | 1055 |
| 1242230 | 35917 | 35932 | 4270 | 4285 | CTAGTTCTGTGTTATG | 62 | N | 1056 |
| 1242254 | 3161 | 3176 | N/A | N/A | GAACAGCTAGAGAGGA | 71 | N | 1057 |
| 1242278 | 6786 | 6801 | N/A | N/A | TGGTATATGGTACCAT | 85 | N | 1058 |
| 1242302 | 8189 | 8204 | N/A | N/A | CTACATCATCATCCTG | 45 | N | 1059 |
| 1242326 | 8655 | 8670 | N/A | N/A | GAAATAAACCATGGGC | 66 | N | 1060 |
| 1242350 | 9551 | 9566 | N/A | N/A | CAACATGCATCTGTGT | 59 | N | 1061 |
| 1242374 | 10477 | 10492 | N/A | N/A | GACAATGGATTTCCTG | 57 | N | 1062 |
| 1242398 | 12755 | 12770 | N/A | N/A | CATACATCAATCTTTG | 59 | N | 1063 |
| 1242422 | 13242 | 13257 | N/A | N/A | CCTAGAAAGAGGGTCT | 54 | N | 1064 |
| 1242446 | 14492 | 14507 | N/A | N/A | CTAGAGAAATGGGTGC | 25 | N | 1065 |
| | 14638 | 14653 | | | | | | |
| | 14711 | 14726 | | | | | | |
| | 14784 | 14799 | | | | | | |
| | 15003 | 15018 | | | | | | |
| | 15076 | 15091 | | | | | | |
| 1242470 | 14558 | 14573 | N/A | N/A | GATGGGTGCTGAGCCC | 19 | N | 1066 |
| | 14850 | 14865 | | | | | | |
| | 15140 | 15155 | | | | | | |
| | 15213 | 15228 | | | | | | |
| | 15286 | 15301 | | | | | | |
| 1242494 | 14603 | 14618 | N/A | N/A | TCAGTGAGAGTCTGTC | 20 | N | 1067 |
| | 14749 | 14764 | | | | | | |
| | 14895 | 14910 | | | | | | |
| | 15041 | 15056 | | | | | | |
| 1242518 | 15113 | 15128 | N/A | N/A | TCCAGTCAGAGTCTGT | 16 | N | 1068 |
| | 15259 | 15274 | | | | | | |
| 1242542 | 17463 | 17478 | N/A | N/A | TCTTTAAAGGAGTGAC | 40 | N | 1069 |
| 1242566 | 18693 | 18708 | N/A | N/A | AGAGAATGGTCGGGTG | 49 | N | 1070 |
| 1242590 | 19742 | 19757 | N/A | N/A | AATAGTTCATAGGTCC | 51 | N | 1071 |
| 1242614 | 20585 | 20600 | N/A | N/A | CTGACCAGAGAGCTCC | 29 | N | 1072 |
| | 20711 | 20726 | | | | | | |
| | 20753 | 20768 | | | | | | |
| | 20879 | 20894 | | | | | | |
| | 20921 | 20936 | | | | | | |
| | 21047 | 21062 | | | | | | |
| 1242638 | 20778 | 20793 | N/A | N/A | GAATAGAGAATGCATC | 105 | N | 1073 |
| 1242662 | 21644 | 21659 | N/A | N/A | CATACAACATCGAGGG | 32 | N | 1074 |
| 1242685 | 22764 | 22779 | N/A | N/A | ACCAATACTACATCTT | 76 | N | 1075 |
| 1242709 | 23340 | 23355 | N/A | N/A | GAAACTCTAGTTCTAT | 35 | N | 1076 |
| 1242733 | 23633 | 23648 | N/A | N/A | ACTAACAAACCAGCCT | 56 | N | 1077 |
| 1242757 | 23991 | 24006 | N/A | N/A | GACAAAGTTATGAGGC | 76 | N | 1078 |
| 1242781 | 24238 | 24253 | N/A | N/A | TAGATATTATTGTCAG | 40 | N | 1079 |
| 1242805 | 24723 | 24738 | N/A | N/A | GTTTAGCATGTCTATT | 27 | N | 1080 |
| 1242829 | 25271 | 25286 | N/A | N/A | ACTAAGTAGTGACCTA | 55 | N | 1081 |
| 1242853 | 26102 | 26117 | N/A | N/A | TCCATAATTAGCAACC | 73 | N | 1082 |
| 1242877 | 26553 | 26568 | N/A | N/A | GTTACAAATCTAACAT | 76 | N | 1083 |
| 1242901 | 26856 | 26871 | N/A | N/A | AAAGAACAGTTATCCC | 37 | N | 1084 |
| 1242925 | 27313 | 27328 | N/A | N/A | CTATTCAATGAGGCAG | 83 | N | 1085 |
| 1242949 | 27868 | 27883 | N/A | N/A | GATAGTAGAAAGTGGG | 69 | N | 1086 |
| 1242973 | 28711 | 28726 | N/A | N/A | TCAAACAACCATGTCC | 62 | N | 1087 |
| 1242997 | 29011 | 29026 | N/A | N/A | GGATTAGTAGCATTCC | 73 | N | 1088 |
| 1243021 | 29375 | 29390 | N/A | N/A | CTATTCCATGAAGCCA | 70 | N | 1089 |
| 1243045 | 29751 | 29766 | N/A | N/A | ATTATATCAACCTGGC | 37 | N | 1090 |
| 1243069 | 31245 | 31260 | N/A | N/A | ACACTAAGAAGACACC | 67 | N | 1091 |
| 1243093 | 31920 | 31935 | N/A | N/A | ACCTAATCTTGAGTGG | 83 | N | 1092 |
| 1243117 | 33589 | 33604 | N/A | N/A | GGGAATAATGCAGGTG | 95 | N | 1093 |
| 1243141 | 33989 | 34004 | N/A | N/A | CTACATGTAGCAGTGT | 57 | N | 1094 |
| 1243165 | 34323 | 34338 | N/A | N/A | CTTACAGGAGAGATAT | 88 | N | 1095 |
| 1243189 | 34444 | 34459 | N/A | N/A | TAACAATTCCCATGAT | 92 | N | 1096 |
| 1243213 | 34708 | 34723 | N/A | N/A | CTTAGTATCACTGTAT | 44 | N | 1097 |
| 1243237 | 9843 | 9858 | N/A | N/A | ATCCCCAACACGGCTG | 51 | N | 1098 |
| 1232737 | 5138 | 5153 | 90 | 105 | ATGCCATCTTGACCCA | 50 | O | 22 |
| 1241417 | 5078 | 5093 | 30 | 45 | TGGACAAACTCTTCAC | 52 | O | 1099 |
| 1241441 | 5156 | 5171 | 108 | 123 | GTGAACAACCACTTCA | 61 | O | 1100 |
| 1241465 | 5263 | 5278 | 215 | 230 | CTGTTGGCTCGATCCA | 78 | O | 1101 |
| 1241489 | 5717 | 5732 | 669 | 684 | GCACACGGATGAGTCT | 63 | O | 1102 |
| 1241513 | 5775 | 5790 | 727 | 742 | AGCTGTTTTCAGGGTC | 59 | O | 1103 |
| 1241537 | 5917 | 5932 | 869 | 884 | TGTCTGACCCCTCGGG | 49 | O | 1104 |
| 1241561 | 5990 | 6005 | 942 | 957 | CCATGGCCCACGCCTT | 44 | O | 1105 |
| 1241585 | 6031 | 6046 | 983 | 998 | ATAAAGGTCTCTCCTG | 60 | O | 1106 |
| 1241609 | 10263 | 10278 | 1063 | 1078 | TCTTCCTGGCATATCA | 44 | O | 1107 |
| 1241633 | 10846 | 10861 | 1149 | 1164 | ACTTCTTACGGTAATC | 44 | O | 1108 |
| 1241657 | 10903 | 10918 | 1206 | 1221 | CCAGACGGGCATTCCT | 50 | O | 1109 |
| 1241681 | 11177 | 11192 | 1480 | 1495 | TGGTAGAGTGTCCCCG | 41 | O | 1110 |
| 1241705 | 11319 | 11334 | 1622 | 1637 | GATTCTGGAGGGTTTT | 72 | O | 1111 |
| 1241729 | 11519 | 11534 | 1822 | 1837 | TGGTCCAGCAAGTGCT | 49 | O | 1112 |
| 1241753 | 11829 | 11844 | 2132 | 2147 | CCAGAGGTGGGCGCAG | 93 | O | 1113 |
| 1241776 | 11979 | 11994 | 2282 | 2297 | GAACTTCTCGCAGTCC | 31 | O | 1114 |
| 1241800 | 12181 | 12196 | 2484 | 2499 | TTACCAGGCCAAAGAG | 73 | O | 1115 |
| 1241823 | 12249 | 12264 | 2552 | 2567 | CTCCAGCCTGATTTGC | 96 | O | 1116 |
| 1241847 | 12375 | 12390 | 2678 | 2693 | ATAGTCCATGGCCCTT | 38 | O | 1117 |
| 1241871 | 12491 | 12506 | 2794 | 2809 | GGCATGTTATGGAGAA | 43 | O | 1118 |
| 1241895 | 12549 | 12564 | 2852 | 2867 | GACACACTGCACCATA | 38 | O | 1119 |
| 1241919 | 16620 | 16635 | 2938 | 2953 | ACTGAAAAGAGGCCCC | 41 | O | 1120 |
| 1241943 | N/A | N/A | 3064 | 3079 | CCCAACCACAATCTCC | 73 | O | 1121 |
| 1241967 | 22983 | 22998 | 3258 | 3273 | ATGCTGATGTGAGGCA | 68 | O | 1122 |
| 1241991 | 23016 | 23031 | 3291 | 3306 | TGGTGCTCAATACTGA | 49 | O | 1123 |
| 1242015 | 23066 | 23081 | 3341 | 3356 | TGAGTCTCCCAAGGCA | 31 | O | 1124 |
| 1242039 | N/A | N/A | 3410 | 3425 | ATTCACCAACCCCAGT | 68 | O | 1125 |
| 1242063 | 31019 | 31034 | 3463 | 3478 | TTAGTGCTGAGTACCG | 31 | O | 1126 |
| 1242087 | 31067 | 31082 | 3511 | 3526 | TTGTCTCCGAGAGTGT | 46 | O | 1127 |
| 1242111 | 31652 | 31667 | 3588 | 3603 | GGTTGCAGTTGTCTAA | 43 | O | 1128 |
| 1242135 | 31758 | 31773 | 3694 | 3709 | ATCATGACCCCCAGGT | 65† | O | 1129 |
| 1242159 | 35540 | 35555 | 3893 | 3908 | CCAGCTGGAGGGACCG | 121 | O | 1130 |
| 1242183 | 35717 | 35732 | 4070 | 4085 | ACAACACCCGATGCTG | 55 | O | 1131 |
| 1242207 | 35790 | 35805 | 4143 | 4158 | GTGCTTTATTGAATGA | 34 | O | 1132 |
| 1242231 | 35918 | 35933 | 4271 | 4286 | ACTAGTTCTGTGTTAT | 69 | O | 1133 |
| 1242255 | 3165 | 3180 | N/A | N/A | TCAGGAACAGCTAGAG | 81 | O | 1134 |
| 1242279 | 6826 | 6841 | N/A | N/A | AGTAATCCAGGTGTTC | 53 | O | 1135 |
| 1242303 | 8222 | 8237 | N/A | N/A | CATTTGTACTCCTCCT | 64 | O | 1136 |
| 1242327 | 8718 | 8733 | N/A | N/A | GTTAAGAGCCAGGCTT | 77 | O | 1137 |
| 1242351 | 9574 | 9589 | N/A | N/A | TACTAAAAGCTCCCAG | 81 | O | 1138 |
| 1242375 | 10478 | 10493 | N/A | N/A | TGACAATGGATTTCCT | 58 | O | 1139 |
| 1242399 | 12812 | 12827 | N/A | N/A | CCCAAACATTTGTTCC | 62 | O | 1140 |
| 1242423 | 13498 | 13513 | N/A | N/A | CTTAATTTTGCCCCAC | 81 | O | 1141 |
| 1242447 | 14493 | 14508 | N/A | N/A | TCTAGAGAAATGGGTG | 21 | O | 1142 |
| | 14639 | 14654 | | | | | | |
| | 14712 | 14727 | | | | | | |
| | 14785 | 14800 | | | | | | |
| | 15004 | 15019 | | | | | | |
| | 15077 | 15092 | | | | | | |
| 1242471 | 14559 | 14574 | N/A | N/A | GGATGGGTGCTGAGCC | 21 | O | 1143 |
| | 14851 | 14866 | | | | | | |
| | 15141 | 15156 | | | | | | |
| | 15214 | 15229 | | | | | | |
| 1242495 | 14604 | 14619 | N/A | N/A | TTCAGTGAGAGTCTGT | 23 | O | 1144 |
| | 14750 | 14765 | | | | | | |
| | 14896 | 14911 | | | | | | |
| | 15042 | 15057 | | | | | | |
| 1242519 | 15182 | 15197 | N/A | N/A | GTCAGAGTCTGTCCTC | 9 | O | 1145 |
| | 15255 | 15270 | | | | | | |
| 1242543 | 17464 | 17479 | N/A | N/A | GTCTTTAAAGGAGTGA | 23 | O | 1146 |
| 1242567 | 18758 | 18773 | N/A | N/A | GCATTTAAGCCACCGA | 23 | O | 1147 |
| 1242591 | 19744 | 19759 | N/A | N/A | GCAATAGTTCATAGGT | 51 | O | 1148 |
| 1242615 | 20586 | 20601 | N/A | N/A | CCTGACCAGAGAGCTC | 42 | O | 1149 |
| | 20628 | 20643 | | | | | | |
| | 20670 | 20685 | | | | | | |
| | 20712 | 20727 | | | | | | |
| | 20754 | 20769 | | | | | | |
| | 20796 | 20811 | | | | | | |
| | 20922 | 20937 | | | | | | |
| | 21048 | 21063 | | | | | | |
| 1242639 | 20781 | 20796 | N/A | N/A | CTGGAATAGAGAATGC | 85 | O | 1150 |
| 1242663 | 21645 | 21660 | N/A | N/A | GCATACAACATCGAGG | 26 | O | 1151 |
| 1242686 | 22765 | 22780 | N/A | N/A | CACCAATACTACATCT | 100 | O | 1152 |
| 1242710 | 23344 | 23359 | N/A | N/A | CTAAGAAACTCTAGTT | 82 | O | 1153 |
| 1242734 | 23635 | 23650 | N/A | N/A | ACACTAACAAACCAGC | 46 | O | 1154 |
| 1242758 | 24069 | 24084 | N/A | N/A | GGAATTAAGGCAGTGG | 37 | O | 1155 |
| 1242782 | 24260 | 24275 | N/A | N/A | TCCAATTTGCTTATTG | 87 | O | 1156 |
| 1242806 | 24732 | 24747 | N/A | N/A | GGGTATATTGTTTAGC | 42 | O | 1157 |
| 1242830 | 25678 | 25693 | N/A | N/A | AAAGGTAAACCAGGCG | 66 | O | 1158 |
| 1242854 | 26103 | 26118 | N/A | N/A | GTCCATAATTAGCAAC | 87 | O | 1159 |
| 1242878 | 26601 | 26616 | N/A | N/A | TTATTTGGTGATACGG | 27 | O | 1160 |
| 1242902 | 26942 | 26957 | N/A | N/A | TTATAGATACCTATCT | 96 | O | 1161 |
| 1242926 | 27315 | 27330 | N/A | N/A | CACTATTCAATGAGGC | 98 | O | 1162 |
| 1242950 | 27890 | 27905 | N/A | N/A | ATAAGTAGGAGCTTCT | 47 | O | 1163 |
| 1242974 | 28712 | 28727 | N/A | N/A | ATCAAACAACCATGTC | 46 | O | 1164 |
| 1242998 | 29012 | 29027 | N/A | N/A | GGGATTAGTAGCATTC | 82 | O | 1165 |
| 1243022 | 29400 | 29415 | N/A | N/A | GTAATTCCTAGGAGCA | 43 | O | 1166 |
| 1243046 | 29752 | 29767 | N/A | N/A | TATTATATCAACCTGG | 64 | O | 1167 |
| 1243070 | 31266 | 31281 | N/A | N/A | CATGATCCTGTAACAA | 80 | O | 1168 |
| 1243094 | 31948 | 31963 | N/A | N/A | AATATCCACCACAACT | 86 | O | 1169 |
| 1243118 | 33590 | 33605 | N/A | N/A | AGGGAATAATGCAGGT | 112 | O | 1170 |
| 1243142 | 34005 | 34020 | N/A | N/A | GGCTAGGTCAGTGATG | 69 | O | 1171 |
| 1243166 | 34365 | 34380 | N/A | N/A | ATGAAGTTGTGAGGGT | 61 | O | 1172 |
| 1243190 | 34445 | 34460 | N/A | N/A | TTAACAATTCCCATGA | 85 | O | 1173 |
| 1243214 | 34709 | 34724 | N/A | N/A | TCTTAGTATCACTGTA | 66 | O | 1174 |
| 1243238 | 24855 | 24870 | N/A | N/A | GCCCATCCCACGCTTC | 73 | O | 1175 |
| 1232737 | 5138 | 5153 | 90 | 105 | ATGCCATCTTGACCCA | 56 | P | 22 |
| 1241418 | 5083 | 5098 | 35 | 50 | GACATTGGACAAACTC | 32 | P | 1176 |
| 1241442 | 5158 | 5173 | 110 | 125 | CGGTGAACAACCACTT | 66 | P | 1177 |
| 1241466 | 5264 | 5279 | 216 | 231 | CCTGTTGGCTCGATCC | 47 | P | 1178 |
| 1241490 | 5718 | 5733 | 670 | 685 | GGCACACGGATGAGTC | 58 | P | 1179 |
| 1241514 | 5796 | 5811 | 748 | 763 | GTGCTTGCCATCTTCA | 35 | P | 1180 |
| 1241538 | 5918 | 5933 | 870 | 885 | CTGTCTGACCCCTCGG | 35 | P | 1181 |
| 1241562 | 5995 | 6010 | 947 | 962 | CACGGCCATGGCCCAC | 56 | P | 1182 |
| 1241586 | 6036 | 6051 | 988 | 1003 | TTCTCATAAAGGTCTC | 31 | P | 1183 |
| 1241610 | 10264 | 10279 | 1064 | 1079 | GTCTTCCTGGCATATC | 49 | P | 1184 |
| 1241634 | 10848 | 10863 | 1151 | 1166 | GTACTTCTTACGGTAA | 68 | P | 1185 |
| 1241658 | 10904 | 10919 | 1207 | 1222 | CCCAGACGGGCATTCC | 60 | P | 1186 |
| 1241682 | 11180 | 11195 | 1483 | 1498 | TCTTGGTAGAGTGTCC | 48 | P | 1187 |
| 1241706 | 11320 | 11335 | 1623 | 1638 | GGATTCTGGAGGGTTT | 56 | P | 1188 |
| 1241730 | 11520 | 11535 | 1823 | 1838 | ATGGTCCAGCAAGTGC | 56 | P | 1189 |
| 1241754 | 11830 | 11845 | 2133 | 2148 | CCCAGAGGTGGGCGCA | 91 | P | 1190 |
| 1241777 | 12031 | 12046 | 2334 | 2349 | GGTAGTACATGGCGGC | 36 | P | 1191 |
| 1241801 | 12183 | 12198 | 2486 | 2501 | GTTTACCAGGCCAAAG | 78 | P | 1192 |
| 1241824 | 12265 | 12280 | 2568 | 2583 | CAATCCATTTCAGCAG | 52 | P | 1193 |
| 1241848 | 12376 | 12391 | 2679 | 2694 | AATAGTCCATGGCCCT | 33 | P | 1194 |
| 1241872 | 12498 | 12513 | 2801 | 2816 | CTCCTTGGGCATGTTA | 49 | P | 1195 |
| 1241896 | 12550 | 12565 | 2853 | 2868 | GGACACACTGCACCAT | 35 | P | 1196 |
| 1241920 | 16621 | 16636 | 2939 | 2954 | AACTGAAAAGAGGCCC | 88 | P | 1197 |
| 1241944 | N/A | N/A | 3067 | 3082 | CGCCCCAACCACAATC | 67 | P | 1198 |
| 1241968 | 22986 | 23001 | 3261 | 3276 | AACATGCTGATGTGAG | 34 | P | 1199 |
| 1241992 | 23017 | 23032 | 3292 | 3307 | CTGGTGCTCAATACTG | 62 | P | 1200 |
| 1242016 | 23072 | 23087 | 3347 | 3362 | GACTCCTGAGTCTCCC | 35 | P | 1201 |
| 1242040 | N/A | N/A | 3412 | 3427 | GAATTCACCAACCCCA | 75 | P | 1202 |
| 1242064 | 31020 | 31035 | 3464 | 3479 | ATTAGTGCTGAGTACC | 58 | P | 1203 |
| 1242088 | 31068 | 31083 | 3512 | 3527 | CTTGTCTCCGAGAGTG | 44 | P | 1204 |
| 1242112 | 31653 | 31668 | 3589 | 3604 | AGGTTGCAGTTGTCTA | 59 | P | 1205 |
| 1242136 | 31764 | 31779 | 3700 | 3715 | CAGAACATCATGACCC | 58† | P | 1206 |
| 1242160 | 35555 | 35570 | 3908 | 3923 | TCCACCTGAGGGCCCC | 70 | P | 1207 |
| 1242184 | 35718 | 35733 | 4071 | 4086 | AACAACACCCGATGCT | 89 | P | 1208 |
| 1242208 | 35791 | 35806 | 4144 | 4159 | AGTGCTTTATTGAATG | 49 | P | 1209 |
| 1242232 | 35920 | 35935 | 4273 | 4288 | CAACTAGTTCTGTGTT | 91 | P | 1210 |
| 1242256 | 3168 | 3183 | N/A | N/A | GCCTCAGGAACAGCTA | 96 | P | 1211 |
| 1242280 | 6827 | 6842 | N/A | N/A | AAGTAATCCAGGTGTT | 92 | P | 1212 |
| 1242304 | 8225 | 8240 | N/A | N/A | ACTCATTTGTACTCCT | 63 | P | |
| 1242328 | 8771 | 8786 | N/A | N/A | GTTATAACTTTTCTGC | 96 | P | 1214 |
| 1242352 | 9677 | 9692 | N/A | N/A | GACTTTAGAATCACCC | 86 | P | 1215 |
| 1242376 | 10542 | 10557 | N/A | N/A | CTTAATCACCGCCGCT | 48 | P | 1216 |
| 1242400 | 12825 | 12840 | N/A | N/A | TAAACTGGCATTCCCC | 51 | P | 1217 |
| 1242424 | 14186 | 14201 | N/A | N/A | TTAGGAAAGGGACCCC | 66 | P | 1218 |
| 1242448 | 14494 | 14509 | N/A | N/A | ATCTAGAGAAATGGGT | 35 | P | 1219 |
| | 14640 | 14655 | | | | | | |
| | 14713 | 14728 | | | | | | |
| | 14786 | 14801 | | | | | | |
| | 15005 | 15020 | | | | | | |
| | 15078 | 15093 | | | | | | |
| 1242472 | 14569 | 14584 | N/A | N/A | CCATCTAGAGGGATGG | 77 | P | 1220 |
| | 14861 | 14876 | | | | | | |
| | 15151 | 15166 | | | | | | |
| | 15224 | 15239 | | | | | | |
| 1242496 | 14605 | 14620 | N/A | N/A | CTTCAGTGAGAGTCTG | 24 | P | 1221 |
| | 14751 | 14766 | | | | | | |
| | 14897 | 14912 | | | | | | |
| | 15043 | 15058 | | | | | | |
| 1242520 | 15290 | 15305 | N/A | N/A | GAAAGATGGGTGCTGA | 86 | P | 1222 |
| 1242544 | 17492 | 17507 | N/A | N/A | TCATAATGTGGCTGTT | 51 | P | 1223 |
| 1242568 | 18759 | 18774 | N/A | N/A | AGCATTTAAGCCACCG | 43 | P | 1224 |
| 1242592 | 19770 | 19785 | N/A | N/A | GAACAACATTCTAGCT | 68 | P | 1225 |
| 1242616 | 20587 | 20602 | N/A | N/A | ACCTGACCAGAGAGCT | 31 | P | 1226 |
| | 20629 | 20644 | | | | | | |
| | 20671 | 20686 | | | | | | |
| | 20713 | 20728 | | | | | | |
| | 20755 | 20770 | | | | | | |
| | 20797 | 20812 | | | | | | |
| | 20923 | 20938 | | | | | | |
| | 21049 | 21064 | | | | | | |
| 1242640 | 20837 | 20852 | N/A | N/A | CTGACAAGAGAGCTCT | 76 | P | 1227 |
| 1242664 | 21728 | 21743 | N/A | N/A | GGTGAGAAATGGCCCT | 52 | P | 1228 |
| 1242687 | 22787 | 22802 | N/A | N/A | AAGTAAGCATTCTCCA | 53 | P | 1229 |
| 1242711 | 23345 | 23360 | N/A | N/A | ACTAAGAAACTCTAGT | 125 | P | 1230 |
| 1242735 | 23686 | 23701 | N/A | N/A | TAAAACATCCACCATG | 97 | P | 1231 |
| 1242759 | 24070 | 24085 | N/A | N/A | GGGAATTAAGGCAGTG | 87 | P | 1232 |
| 1242783 | 24265 | 24280 | N/A | N/A | ACCTATCCAATTTGCT | 93 | P | 1233 |
| 1242807 | 24743 | 24758 | N/A | N/A | TCTTATACACAGGGTA | 31 | P | 1234 |
| 1242831 | 25745 | 25760 | N/A | N/A | GTTGAAATTGAGAGGT | 31 | P | 1235 |
| 1242855 | 26114 | 26129 | N/A | N/A | GAAATCCATTTGTCCA | 68 | P | 1236 |
| 1242879 | 26602 | 26617 | N/A | N/A | CTTATTTGGTGATACG | 54 | P | 1237 |
| 1242903 | 26946 | 26961 | N/A | N/A | CCACTTATAGATACCT | 43 | P | 1238 |
| 1242927 | 27316 | 27331 | N/A | N/A | CCACTATTCAATGAGG | 85 | P | 1239 |
| 1242951 | 27891 | 27906 | N/A | N/A | AATAAGTAGGAGCTTC | 49 | P | 1240 |
| 1242975 | 28714 | 28729 | N/A | N/A | GAATCAAACAACCATG | 60 | P | 1241 |
| 1242999 | 29013 | 29028 | N/A | N/A | AGGGATTAGTAGCATT | 72 | P | 1242 |
| 1243023 | 29401 | 29416 | N/A | N/A | CGTAATTCCTAGGAGC | 57 | P | 1243 |
| 1243047 | 29755 | 29770 | N/A | N/A | GATTATTATATCAACC | 108 | P | 1244 |
| 1243071 | 31297 | 31312 | N/A | N/A | CTATATCATCTGGAAG | 94 | P | 1245 |
| 1243095 | 32070 | 32085 | N/A | N/A | CATGATCGCATGAGGG | 53 | P | 1246 |
| 1243119 | 33606 | 33621 | N/A | N/A | GAATTTAGGAAGGTAC | 113 | P | 1247 |
| 1243143 | 34050 | 34065 | N/A | N/A | CTATTTTGAGCCTGTC | 50 | P | 1248 |
| 1243167 | 34366 | 34381 | N/A | N/A | GATGAAGTTGTGAGGG | 73 | P | 1249 |
| 1243191 | 34446 | 34461 | N/A | N/A | CTTAACAATTCCCATG | 70 | P | 1250 |
| 1243215 | 34724 | 34739 | N/A | N/A | CGTTTAACAATAATTT | 105 | P | 1251 |
| 1243239 | 33636 | 33651 | N/A | N/A | ACAGCCTCGCAGAGAA | 82 | P | 1252 |
| 1232737 | 5138 | 5153 | 90 | 105 | ATGCCATCTTGACCCA | 60 | Q | 22 |
| 1241419 | 5088 | 5103 | 40 | 55 | GCTATGACATTGGACA | 54 | Q | 1253 |
| 1241443 | 5167 | 5182 | 119 | 134 | TACAGTTTACGGTGAA | 50 | Q | 1254 |
| 1241467 | 5265 | 5280 | 217 | 232 | TCCTGTTGGCTCGATC | 56 | Q | 1255 |
| 1241491 | 5728 | 5743 | 680 | 695 | CAGTGAACACGGCACA | 23 | Q | 1256 |
| 1241515 | 5797 | 5812 | 749 | 764 | GGTGCTTGCCATCTTC | 47 | Q | 1257 |
| 1241539 | 5919 | 5934 | 871 | 886 | TCTGTCTGACCCCTCG | 32 | Q | 1258 |
| 1241563 | 5996 | 6011 | 948 | 963 | ACACGGCCATGGCCCA | 33 | Q | 1259 |
| 1241587 | 6038 | 6053 | 990 | 1005 | CTTTCTCATAAAGGTC | 52 | Q | 1260 |
| 1241611 | 10265 | 10280 | 1065 | 1080 | TGTCTTCCTGGCATAT | 52 | Q | 1261 |
| 1241635 | 10849 | 10864 | 1152 | 1167 | TGTACTTCTTACGGTA | 39 | Q | 1262 |
| 1241659 | 10906 | 10921 | 1209 | 1224 | CACCCAGACGGGCATT | 57 | Q | 1263 |
| 1241683 | 11181 | 11196 | 1484 | 1499 | GTCTTGGTAGAGTGTC | 31 | Q | 1264 |
| 1241707 | 11321 | 11336 | 1624 | 1639 | AGGATTCTGGAGGGTT | 60 | Q | 1265 |
| 1241731 | 11521 | 11536 | 1824 | 1839 | GATGGTCCAGCAAGTG | 39 | Q | 1266 |
| 1241755 | 11831 | 11846 | 2134 | 2149 | CCCCAGAGGTGGGCGC | 65 | Q | 1267 |
| 1241778 | 12033 | 12048 | 2336 | 2351 | CAGGTAGTACATGGCG | 47 | Q | 1268 |
| 1241802 | 12184 | 12199 | 2487 | 2502 | GGTTTACCAGGCCAAA | 38 | Q | 1269 |
| 1241825 | 12274 | 12289 | 2577 | 2592 | CTTTCACTTCAATCCA | 36 | Q | 1270 |
| 1241849 | 12401 | 12416 | 2704 | 2719 | GAGAGATTGATCTCAA | 68 | Q | 1271 |
| 1241873 | 12499 | 12514 | 2802 | 2817 | CCTCCTTGGGCATGTT | 41 | Q | 1272 |
| 1241897 | 12551 | 12566 | 2854 | 2869 | AGGACACACTGCACCA | 38 | Q | 1273 |
| 1241921 | 16644 | 16659 | 2962 | 2977 | GTTAGACTCTGGCTGG | 29 | Q | 1274 |
| 1241945 | 21109 | 21124 | 3080 | 3095 | CGAGAGGCCACAGCGC | 66 | Q | 1275 |
| 1241969 | 22987 | 23002 | 3262 | 3277 | CAACATGCTGATGTGA | 54 | Q | 1276 |
| 1241993 | 23018 | 23033 | 3293 | 3308 | GCTGGTGCTCAATACT | 48 | Q | 1277 |
| 1242017 | 23073 | 23088 | 3348 | 3363 | CGACTCCTGAGTCTCC | 57 | Q | 1278 |
| 1242041 | N/A | N/A | 3413 | 3428 | AGAATTCACCAACCCC | 43 | Q | 1279 |
| 1242065 | 31022 | 31037 | 3466 | 3481 | TGATTAGTGCTGAGTA | 43 | Q | 1280 |
| 1242089 | 31069 | 31084 | 3513 | 3528 | CCTTGTCTCCGAGAGT | 37 | Q | 1281 |
| 1242113 | 31654 | 31669 | 3590 | 3605 | GAGGTTGCAGTTGTCT | 43 | Q | 1282 |
| 1242137 | 31766 | 31781 | 3702 | 3717 | CACAGAACATCATGAC | 63† | Q | 1283 |
| 1242161 | 35570 | 35585 | 3923 | 3938 | TGGATCGCAGCTCTCT | 33 | Q | 1284 |
| 1242185 | 35721 | 35736 | 4074 | 4089 | GACAACAACACCCGAT | 77 | Q | 1285 |
| 1242209 | 35872 | 35887 | 4225 | 4240 | TGATATGAGCAAAAGT | 78 | Q | 1286 |
| 1242233 | 35921 | 35936 | 4274 | 4289 | TCAACTAGTTCTGTGT | 62 | Q | 1287 |
| 1242257 | N/A | N/A | N/A | N/A | ATCCAGATGCCAGCCT | 75 | Q | 1288 |
| 1242281 | 6828 | 6843 | N/A | N/A | GAAGTAATCCAGGTGT | 49 | Q | 1289 |
| 1242305 | 8251 | 8266 | N/A | N/A | CTTAACATGTGTCTCC | 63 | O | 1290 |
| 1242329 | 8774 | 8789 | N/A | N/A | CTAGTTATAACTTTTC | 82 | Q | 1291 |
| 1242353 | 9691 | 9706 | N/A | N/A | TGGGAATCCTGGCTGA | 78 | Q | 1292 |
| 1242377 | 10543 | 10558 | N/A | N/A | GCTTAATCACCGCCGC | 52 | Q | 1293 |
| 1242401 | 12827 | 12842 | N/A | N/A | GCTAAACTGGCATTCC | 60 | Q | 1294 |
| 1242425 | 14187 | 14202 | N/A | N/A | CTTAGGAAAGGGACCC | 66 | Q | 1295 |
| 1242449 | 14495 | 14510 | N/A | N/A | TATCTAGAGAAATGGG | 32 | Q | 1296 |
| | 14641 | 14656 | | | | | | |
| | 14714 | 14729 | | | | | | |
| | 14787 | 14802 | | | | | | |
| | 15006 | 15021 | | | | | | |
| | 15079 | 15094 | | | | | | |
| 1242473 | 14570 | 14585 | N/A | N/A | GCCATCTAGAGGGATG | 53 | Q | 1297 |
| | 14862 | 14877 | | | | | | |
| | 15152 | 15167 | | | | | | |
| | 15225 | 15240 | | | | | | |
| 1242497 | 14606 | 14621 | N/A | N/A | GCTTCAGTGAGAGTCT | 24 | Q | 1298 |
| | 14752 | 14767 | | | | | | |
| | 14898 | 14913 | | | | | | |
| | 15044 | 15059 | | | | | | |
| 1242521 | 15292 | 15307 | N/A | N/A | TAGAAAGATGGGTGCT | 51 | Q | 1299 |
| 1242545 | 17657 | 17672 | N/A | N/A | CATCATGGTTGTTTCA | 31 | Q | 1300 |
| 1242569 | 18760 | 18775 | N/A | N/A | AAGCATTTAAGCCACC | 47 | Q | 1301 |
| 1242593 | 19793 | 19808 | N/A | N/A | CTTTATCCCTGTCATG | 73 | Q | 1302 |
| 1242617 | 20588 | 20603 | N/A | N/A | CACCTGACCAGAGAGC | 28 | Q | 1303 |
| | 20630 | 20645 | | | | | | |
| | 20672 | 20687 | | | | | | |
| | 20714 | 20729 | | | | | | |
| | 20756 | 20771 | | | | | | |
| | 20798 | 20813 | | | | | | |
| | 20924 | 20939 | | | | | | |
| | 21050 | 21065 | | | | | | |
| 1242641 | 20877 | 20892 | N/A | N/A | GACCAGAGAGCTCCAG | 33 | Q | 1304 |
| | 21045 | 21060 | | | | | | |
| 1242665 | 21874 | 21889 | N/A | N/A | TAGGAATTGCTGTGCT | 34 | Q | 1305 |
| 1242688 | 22788 | 22803 | N/A | N/A | CAAGTAAGCATTCTCC | 32 | Q | 1306 |
| 1242712 | 23346 | 23361 | N/A | N/A | CACTAAGAAACTCTAG | 77 | Q | 1307 |
| 1242736 | 23687 | 23702 | N/A | N/A | GTAAAACATCCACCAT | 66 | Q | 1308 |
| 1242760 | 24071 | 24086 | N/A | N/A | TGGGAATTAAGGCAGT | 63 | Q | 1309 |
| 1242784 | 24316 | 24331 | N/A | N/A | CTTGAATGCTGATCTG | 65 | Q | 1310 |
| 1242808 | 24744 | 24759 | N/A | N/A | CTCTTATACACAGGGT | 30 | Q | 1311 |
| 1242832 | 25773 | 25788 | N/A | N/A | ATGATATCTGGGTTTG | 35 | Q | 1312 |
| 1242856 | 26124 | 26139 | N/A | N/A | GCATATACAGGAAATC | 79 | Q | 1313 |
| 1242880 | 26603 | 26618 | N/A | N/A | CCTTATTTGGTGATAC | 36 | Q | 1314 |
| 1242904 | 26956 | 26971 | N/A | N/A | CTGATTAATGCCACTT | 22 | Q | 1315 |
| 1242928 | 27367 | 27382 | N/A | N/A | AGCATTTAGGACCGTC | 25 | Q | 1316 |
| 1242952 | 27919 | 27934 | N/A | N/A | GACAAAATGAGGATCA | 72 | Q | 1317 |
| 1242976 | 28750 | 28765 | N/A | N/A | CAACGGTTACACTGAA | 40 | Q | 1318 |
| 1243000 | 29014 | 29029 | N/A | N/A | AAGGGATTAGTAGCAT | 61 | Q | 1319 |
| 1243024 | 29415 | 29430 | N/A | N/A | AAAATCACTGGTGGCG | 40 | Q | 1320 |
| 1243048 | 29756 | 29771 | N/A | N/A | TGATTATTATATCAAC | 95 | Q | 1321 |
| 1243072 | 31298 | 31313 | N/A | N/A | TCTATATCATCTGGAA | 73 | Q | 1322 |
| 1243096 | 32087 | 32102 | N/A | N/A | ACAGAATCCTCCTTGG | 84 | Q | 1323 |
| 1243120 | 33712 | 33727 | N/A | N/A | CATAAGATGTGCTACA | 90 | Q | 1324 |
| 1243144 | 34052 | 34067 | N/A | N/A | ATCTATTTTGAGCCTG | 38 | Q | 1325 |
| 1243168 | 34369 | 34384 | N/A | N/A | TTAGATGAAGTTGTGA | 58 | Q | 1326 |
| 1243192 | 34482 | 34497 | N/A | N/A | CAATTTGGTGGTGTTA | 57 | Q | 1327 |
| 1243216 | 34750 | 34765 | N/A | N/A | TTACAATGTCACTATC | 58 | Q | 1328 |
| 1243240 | 19916 | 19931 | N/A | N/A | GCTGGGATTCCACATC | 55 | Q | 1329 |
| 1232737 | 5138 | 5153 | 90 | 105 | ATGCCATCTTGACCCA | 45 | R | 22 |
| 1241420 | 5090 | 5105 | 42 | 57 | GGGCTATGACATTGGA | 70 | R | 1330 |
| 1241444 | 5169 | 5184 | 121 | 136 | ATTACAGTTTACGGTG | 73 | R | 1331 |
| 1241468 | 5270 | 5285 | 222 | 237 | AGTTCTCCTGTTGGCT | 45 | R | 1332 |
| 1241492 | 5729 | 5744 | 681 | 696 | GCAGTGAACACGGCAC | 46 | R | 1333 |
| 1241516 | 5810 | 5825 | 762 | 777 | CCAGCTTGCAGCGGGT | 57 | R | 1334 |
| 1241540 | 5936 | 5951 | 888 | 903 | CCACATGGTCTGCCTT | 38 | R | 1335 |
| 1241564 | 5997 | 6012 | 949 | 964 | CACACGGCCATGGCCC | 37 | R | 1336 |
| 1241588 | 6039 | 6054 | 991 | 1006 | GCTTTCTCATAAAGGT | 49 | R | 1337 |
| 1241612 | 10266 | 10281 | 1066 | 1081 | CTGTCTTCCTGGCATA | 52 | R | 1338 |
| 1241636 | 10850 | 10865 | 1153 | 1168 | CTGTACTTCTTACGGT | 46 | R | 1339 |
| 1241660 | 10923 | 10938 | 1226 | 1241 | GTTGAGGCTCACACTC | 43 | R | 1340 |
| 1241684 | 11212 | 11227 | 1515 | 1530 | GACAGTGGATATAGAA | 54 | R | 1341 |
| 1241708 | 11323 | 11338 | 1626 | 1641 | AGAGGATTCTGGAGGG | 68 | R | 1342 |
| 1241732 | 11522 | 11537 | 1825 | 1840 | GGATGGTCCAGCAAGT | 42 | R | 1343 |
| 1241756 | 11843 | 11858 | 2146 | 2161 | AAAGAGCAGAGCCCCC | 91 | R | 1344 |
| 1241779 | 12034 | 12049 | 2337 | 2352 | GCAGGTAGTACATGGC | 51 | R | 1345 |
| 1241803 | 12185 | 12200 | 2488 | 2503 | TGGTTTACCAGGCCAA | 69 | R | 1346 |
| 1241826 | 12275 | 12290 | 2578 | 2593 | GCTTTCACTTCAATCC | 24 | R | 1347 |
| 1241850 | 12402 | 12417 | 2705 | 2720 | GGAGAGATTGATCTCA | 29 | R | 1348 |
| 1241874 | 12501 | 12516 | 2804 | 2819 | TTCCTCCTTGGGCATG | 33 | R | 1349 |
| 1241898 | 12552 | 12567 | 2855 | 2870 | GAGGACACACTGCACC | 25 | R | 1350 |
| 1241922 | 16645 | 16660 | 2963 | 2978 | AGTTAGACTCTGGCTG | 42 | R | 1351 |
| 1241946 | 21110 | 21125 | 3081 | 3096 | GCGAGAGGCCACAGCG | 61 | R | 1352 |
| 1241970 | 22988 | 23003 | 3263 | 3278 | ACAACATGCTGATGTG | 68 | R | 1353 |
| 1241994 | 23024 | 23039 | 3299 | 3314 | GGAATGGCTGGTGCTC | 33 | R | 1354 |
| 1242018 | 23074 | 23089 | 3349 | 3364 | GCGACTCCTGAGTCTC | 48 | R | 1355 |
| 1242042 | 30971 | 30986 | 3415 | 3430 | CCAGAATTCACCAACC | 62 | R | 1356 |
| 1242066 | 31023 | 31038 | 3467 | 3482 | CTGATTAGTGCTGAGT | 34 | R | 1357 |
| 1242090 | 31073 | 31088 | 3517 | 3532 | ATCCCCTTGTCTCCGA | 46 | R | 1358 |
| 1242114 | 31655 | 31670 | 3591 | 3606 | TGAGGTTGCAGTTGTC | 36 | R | 1359 |
| 1242138 | 31779 | 31794 | 3715 | 3730 | TGTTTCAGCACTTCAC | 28† | R | 1360 |
| 1242162 | 35572 | 35587 | 3925 | 3940 | GATGGATCGCAGCTCT | 67 | R | 1361 |
| 1242186 | 35722 | 35737 | 4075 | 4090 | TGACAACAACACCCGA | 77 | R | 1362 |
| 1242210 | 35876 | 35891 | 4229 | 4244 | ATGATGATATGAGCAA | 74 | R | 1363 |
| 1242234 | 35922 | 35937 | 4275 | 4290 | GTCAACTAGTTCTGTG | 42 | R | 1364 |
| 1242258 | N/A | N/A | N/A | N/A | TCCTCATCCAGATGCC | 74 | R | 1365 |
| 1242282 | 6829 | 6844 | N/A | N/A | AGAAGTAATCCAGGTG | 39 | R | 1366 |
| 1242306 | 8252 | 8267 | N/A | N/A | CCTTAACATGTGTCTC | 61 | R | 1367 |
| 1242330 | 8821 | 8836 | N/A | N/A | CTAAAACCTAACCCCA | 95 | R | 1368 |
| 1242354 | 9705 | 9720 | N/A | N/A | CCTAATCTAGTGGTTG | 64 | R | 1369 |
| 1242378 | 10557 | 10572 | N/A | N/A | ATCAAACTTGAAACGC | 35 | R | 1370 |
| 1242402 | 12839 | 12854 | N/A | N/A | TTAATACCTTGTGCTA | 48 | R | 1371 |
| 1242426 | 14230 | 14245 | N/A | N/A | GTTAAGTTATGAGGGT | 38 | R | 1372 |
| 1242450 | 14496 | 14511 | N/A | N/A | CTATCTAGAGAAATGG | 33 | R | 1373 |
| | 14642 | 14657 | | | | | | |
| | 14715 | 14730 | | | | | | |
| | 14788 | 14803 | | | | | | |
| | 14934 | 14949 | | | | | | |
| | 15007 | 15022 | | | | | | |
| | 15080 | 15095 | | | | | | |
| 1242474 | 14572 | 14587 | N/A | N/A | GTGCCATCTAGAGGGA | 36 | R | 1374 |
| | 14864 | 14879 | | | | | | |
| | 15154 | 15169 | | | | | | |
| | 15227 | 15242 | | | | | | |
| 1242498 | 14607 | 14622 | N/A | N/A | GGCTTCAGTGAGAGTC | 31 | R | 1375 |
| | 14753 | 14768 | | | | | | |
| | 14899 | 14914 | | | | | | |
| | 15045 | 15060 | | | | | | |
| 1242522 | 15294 | 15309 | N/A | N/A | TCTAGAAAGATGGGTG | 54 | R | 1376 |
| 1242546 | 17670 | 17685 | N/A | N/A | GGAATATATCGAGCAT | 13 | R | 1377 |
| 1242570 | 18852 | 18867 | N/A | N/A | GTAACATATCCATGAA | 28 | R | 1378 |
| 1242594 | 19795 | 19810 | N/A | N/A | TACTTTATCCCTGTCA | 57 | R | 1379 |
| 1242618 | 20589 | 20604 | N/A | N/A | ACACCTGACCAGAGAG | 23 | R | 1380 |
| | 20631 | 20646 | | | | | | |
| | 20673 | 20688 | | | | | | |
| | 20715 | 20730 | | | | | | |
| | 20757 | 20772 | | | | | | |
| | 20799 | 20814 | | | | | | |
| | 20925 | 20940 | | | | | | |
| | 21051 | 21066 | | | | | | |
| 1242642 | 20878 | 20893 | N/A | N/A | TGACCAGAGAGCTCCA | 32 | R | 1381 |
| | 21046 | 21061 | | | | | | |
| 1242666 | 22296 | 22311 | N/A | N/A | TCTAATAGTGTTGCTA | 48 | R | 1382 |
| 1242689 | 22789 | 22804 | N/A | N/A | ACAAGTAAGCATTCTC | 29 | R | 1383 |
| 1242713 | 23381 | 23396 | N/A | N/A | CAATTGGGCTGCACCA | 45 | R | 1384 |
| 1242737 | 23690 | 23705 | N/A | N/A | GAGGTAAAACATCCAC | 69 | R | 1385 |
| 1242761 | 24086 | 24101 | N/A | N/A | CCTAAGGCAATGCACT | 50 | R | 1386 |
| 1242785 | 24328 | 24343 | N/A | N/A | GCCAAATTTTGTCTTG | 59 | R | 1387 |
| 1242809 | 24745 | 24760 | N/A | N/A | GCTCTTATACACAGGG | 27 | R | 1388 |
| 1242833 | 25778 | 25793 | N/A | N/A | TGTGAATGATATCTGG | 24 | R | 1389 |
| 1242857 | 26129 | 26144 | N/A | N/A | GATCAGCATATACAGG | 83 | R | 1390 |
| 1242881 | 26648 | 26663 | N/A | N/A | GACTTTATATGTGGAA | 41 | R | 1391 |
| 1242905 | 26957 | 26972 | N/A | N/A | ACTGATTAATGCCACT | 22 | R | 1392 |
| 1242929 | 27368 | 27383 | N/A | N/A | GAGCATTTAGGACCGT | 23 | R | 1393 |
| 1242953 | 27995 | 28010 | N/A | N/A | ACTTTAAACAGGGTTA | 55 | R | 1394 |
| 1242977 | 28752 | 28767 | N/A | N/A | AGCAACGGTTACACTG | 43 | R | 1395 |
| 1243001 | 29030 | 29045 | N/A | N/A | GTTAATTAACATGCAG | 62 | R | 1396 |
| 1243025 | 29416 | 29431 | N/A | N/A | TAAAATCACTGGTGGC | 39 | R | 1397 |
| 1243049 | 30077 | 30092 | N/A | N/A | ATTAGTTAGGGTGGTG | 40 | R | 1398 |
| 1243073 | 31300 | 31315 | N/A | N/A | CATCTATATCATCTGG | 41 | R | 1399 |
| 1243097 | 32140 | 32155 | N/A | N/A | CCAATTTGGATGACCC | 37 | R | 1400 |
| 1243121 | 33713 | 33728 | N/A | N/A | ACATAAGATGTGCTAC | 71 | R | 1401 |
| 1243145 | 34054 | 34069 | N/A | N/A | CAATCTATTTTGAGCC | 55 | R | 1402 |
| 1243169 | 34370 | 34385 | N/A | N/A | GTTAGATGAAGTTGTG | 63 | R | 1403 |
| 1243193 | 34483 | 34498 | N/A | N/A | TCAATTTGGTGGTGTT | 55 | R | 1404 |
| 1243217 | 34800 | 34815 | N/A | N/A | CTGCATTTAATGCATC | 82 | R | 1405 |
| 1243241 | 22847 | 22862 | N/A | N/A | AGGGAGTGGACACAAG | 78 | R | 1406 |
| 1232737 | 5138 | 5153 | 90 | 105 | ATGCCATCTTGACCCA | 60 | S | 22 |
| 1241421 | 5106 | 5121 | 58 | 73 | TGTCCCGTTGATTACG | 76 | S | 1407 |
| 1241445 | 5176 | 5191 | 128 | 143 | GGATTGTATTACAGTT | 56 | S | 1408 |
| 1241469 | 5271 | 5286 | 223 | 238 | AAGTTCTCCTGTTGGC | 62 | S | 1409 |
| 1241493 | 5736 | 5751 | 688 | 703 | ATACCAGGCAGTGAAC | 83 | S | 1410 |
| 1241517 | 5819 | 5834 | 771 | 786 | GGTACCTGGCCAGCTT | 95 | S | 1411 |
| 1241541 | 5938 | 5953 | 890 | 905 | ATCCACATGGTCTGCC | 72 | S | 1412 |
| 1241565 | 5998 | 6013 | 950 | 965 | CCACACGGCCATGGCC | 51 | S | 1413 |
| 1241589 | 6053 | 6068 | 1005 | 1020 | GCTCATCTCTTTTTGC | 78 | S | 1414 |
| 1241613 | 10277 | 10292 | 1077 | 1092 | CCTCTTCAATGCTGTC | 33 | S | 1415 |
| 1241637 | 10851 | 10866 | 1154 | 1169 | TCTGTACTTCTTACGG | 46 | S | 1416 |
| 1241661 | 10928 | 10943 | 1231 | 1246 | CGTTTGTTGAGGCTCA | 25 | S | 1417 |
| 1241685 | 11233 | 11248 | 1536 | 1551 | GTGTCACAAGGCTCAC | 53 | S | 1418 |
| 1241709 | 11354 | 11369 | 1657 | 1672 | CCTTGCAGCTCATCGA | 44 | S | 1419 |
| 1241733 | 11523 | 11538 | 1826 | 1841 | AGGATGGTCCAGCAAG | 57 | S | 1420 |
| 1241757 | 11896 | 11911 | 2199 | 2214 | TGAGGTCGGACTCCTC | 108 | S | 1421 |
| 1241780 | 12084 | 12099 | 2387 | 2402 | CTTCAAACGACTCCCT | 66 | S | 1422 |
| 1241804 | 12186 | 12201 | 2489 | 2504 | CTGGTTTACCAGGCCA | 54 | S | 1423 |
| 1241827 | 12289 | 12304 | 2592 | 2607 | GCTTTTTAGCTTTGGC | 38 | S | 1424 |
| 1241851 | 12403 | 12418 | 2706 | 2721 | TGGAGAGATTGATCTC | 69 | S | 1425 |
| 1241875 | 12525 | 12540 | 2828 | 2843 | TCGGCCTTCCTTTTCC | 67 | S | 1426 |
| 1241899 | 12553 | 12568 | 2856 | 2871 | GGAGGACACACTGCAC | 55 | S | 1427 |
| 1241923 | 16646 | 16661 | 2964 | 2979 | CAGTTAGACTCTGGCT | 41 | S | 1428 |
| 1241947 | 21117 | 21132 | 3088 | 3103 | CACTCATGCGAGAGGC | 47 | S | 1429 |
| 1241971 | 22989 | 23004 | 3264 | 3279 | GACAACATGCTGATGT | 64 | S | 1430 |
| 1241995 | 23025 | 23040 | 3300 | 3315 | GGGAATGGCTGGTGCT | 39 | S | 1431 |
| 1242019 | 23076 | 23091 | 3351 | 3366 | TTGCGACTCCTGAGTC | 55 | S | 1432 |
| 1242043 | 30972 | 30987 | 3416 | 3431 | GCCAGAATTCACCAAC | 54 | S | 1433 |
| 1242067 | 31024 | 31039 | 3468 | 3483 | TCTGATTAGTGCTGAG | 37 | S | 1434 |
| 1242091 | 31074 | 31089 | 3518 | 3533 | GATCCCCTTGTCTCCG | 52 | S | 1435 |
| 1242115 | 31656 | 31671 | 3592 | 3607 | GTGAGGTTGCAGTTGT | 36 | S | 1436 |
| 1242139 | 31781 | 31796 | 3717 | 3732 | GCTGTTTCAGCACTTC | 8† | S | 1437 |
| 1242163 | 35573 | 35588 | 3926 | 3941 | GGATGGATCGCAGCTC | 36 | S | 1438 |
| 1242187 | 35723 | 35738 | 4076 | 4091 | ATGACAACAACACCCG | 68 | S | 1439 |
| 1242211 | 35879 | 35894 | 4232 | 4247 | GGAATGATGATATGAG | 89 | S | 1440 |
| 1242235 | 35924 | 35939 | 4277 | 4292 | TAGTCAACTAGTTCTG | 53 | S | 1441 |
| 1242259 | N/A | N/A | N/A | N/A | TTCCTCATCCAGATGC | 63 | S | 1442 |
| 1242283 | 6865 | 6880 | N/A | N/A | CAACACTCATAACAGC | 82 | S | 1443 |
| 1242307 | 8254 | 8269 | N/A | N/A | TGCCTTAACATGTGTC | 77 | S | 1444 |
| 1242331 | 8844 | 8859 | N/A | N/A | GTAAATTAGCCAAAGT | 74 | S | 1445 |
| 1242355 | 9764 | 9779 | N/A | N/A | CTATTGTCAAGTCTAG | 56 | S | 1446 |
| 1242379 | 10561 | 10576 | N/A | N/A | CCTTATCAAACTTGAA | 57 | S | 1447 |
| 1242403 | 12840 | 12855 | N/A | N/A | CTTAATACCTTGTGCT | 70 | S | 1448 |
| 1242427 | 14296 | 14311 | N/A | N/A | AAAATCCATACGCTGA | 75 | S | 1449 |
| 1242451 | 14497 | 14512 | N/A | N/A | GCTATCTAGAGAAATG | 32 | S | 1450 |
| | 14643 | 14658 | | | | | | |
| | 14716 | 14731 | | | | | | |
| | 14789 | 14804 | | | | | | |
| | 14935 | 14950 | | | | | | |
| | 15008 | 15023 | | | | | | |
| | 15081 | 15096 | | | | | | |
| 1242475 | 14573 | 14588 | N/A | N/A | GGTGCCATCTAGAGGG | 71 | S | 1451 |
| | 14865 | 14880 | | | | | | |
| | 15155 | 15170 | | | | | | |
| | 15228 | 15243 | | | | | | |
| 1242499 | 14667 | 14682 | N/A | N/A | GTCTGTCCTCAGAGGA | 8 | S | 1452 |
| | 14740 | 14755 | | | | | | |
| | 14813 | 14828 | | | | | | |
| | 14959 | 14974 | | | | | | |
| | 15032 | 15047 | | | | | | |
| 1242523 | 15312 | 15327 | N/A | N/A | AGAGTAAGGCAGCTGC | 30 | S | 1453 |
| 1242547 | 17671 | 17686 | N/A | N/A | TGGAATATATCGAGCA | 13 | S | 1454 |
| 1242571 | 18855 | 18870 | N/A | N/A | GCAGTAACATATCCAT | 15 | S | 1455 |
| 1242595 | 19797 | 19812 | N/A | N/A | TATACTTTATCCCTGT | 73 | S | 1456 |
| 1242619 | 20592 | 20607 | N/A | N/A | AATACACCTGACCAGA | 68 | S | 1457 |
| 1242643 | 20893 | 20908 | N/A | N/A | GCATCAGAACACATCT | 54 | S | 1458 |
| | 20977 | 20992 | | | | | | |
| 1242667 | 22297 | 22312 | N/A | N/A | TTCTAATAGTGTTGCT | 64 | S | 1459 |
| 1242690 | 22791 | 22806 | N/A | N/A | TAACAAGTAAGCATTC | 70 | S | 1460 |
| 1242714 | 23383 | 23398 | N/A | N/A | GGCAATTGGGCTGCAC | 49 | S | 1461 |
| 1242738 | 23691 | 23706 | N/A | N/A | GGAGGTAAAACATCCA | 71 | S | 1462 |
| 1242762 | 24087 | 24102 | N/A | N/A | TCCTAAGGCAATGCAC | 53 | S | 1463 |
| 1242786 | 24362 | 24377 | N/A | N/A | ATTAGTGGATTACTCC | 52 | S | 1464 |
| 1242810 | 24784 | 24799 | N/A | N/A | AGAGAAGCACCCCTCG | 71 | S | 1465 |
| 1242834 | 25819 | 25834 | N/A | N/A | ATGTTTACACCAAGCA | 24 | S | 1466 |
| 1242858 | 26143 | 26158 | N/A | N/A | ATAAATACCACCCAGA | 82 | S | 1467 |
| 1242882 | 26655 | 26670 | N/A | N/A | CCTCTAAGACTTTATA | 95 | S | 1468 |
| 1242906 | 26972 | 26987 | N/A | N/A | TGCATAAAAGTCTCGA | 40 | S | 1469 |
| 1242930 | 27377 | 27392 | N/A | N/A | CCGAAAGCAGAGCATT | 68 | S | 1470 |
| 1242954 | 27996 | 28011 | N/A | N/A | GACTTTAAACAGGGTT | 46 | S | 1471 |
| 1242978 | 28755 | 28770 | N/A | N/A | TTAAGCAACGGTTACA | 53 | S | 1472 |
| 1243002 | 29057 | 29072 | N/A | N/A | CGGTAAGAATTCTATC | 83 | S | 1473 |
| 1243026 | 29417 | 29432 | N/A | N/A | CTAAAATCACTGGTGG | 55 | S | 1474 |
| 1243050 | 30078 | 30093 | N/A | N/A | AATTAGTTAGGGTGGT | 48 | S | 1475 |
| 1243074 | 31313 | 31328 | N/A | N/A | ACTCAAGTTCCTACAT | 78 | S | 1476 |
| 1243098 | 32507 | 32522 | N/A | N/A | CCCATTTAGAAATCCT | 52 | S | 1477 |
| 1243122 | 33714 | 33729 | N/A | N/A | CACATAAGATGTGCTA | 101 | S | 1478 |
| 1243146 | 34077 | 34092 | N/A | N/A | GTTGATTGCATTCATG | 49 | S | 1479 |
| 1243170 | 34373 | 34388 | N/A | N/A | AGAGTTAGATGAAGTT | 49 | S | 1480 |
| 1243194 | 34484 | 34499 | N/A | N/A | CTCAATTTGGTGGTGT | 62 | S | 1481 |
| 1243218 | 34843 | 34858 | N/A | N/A | CTATTGCCCACCCACT | 107 | S | 1482 |
| 1243242 | 27679 | 27694 | N/A | N/A | ATGAGATCAGGCACTC | 86 | S | 1483 |
| 1232737 | 5138 | 5153 | 90 | 105 | ATGCCATCTTGACCCA | 48 | T | 22 |
| 1241422 | 5107 | 5122 | 59 | 74 | TTGTCCCGTTGATTAC | 63 | T | 1484 |
| 1241446 | 5180 | 5195 | 132 | 147 | AACAGGATTGTATTAC | 88 | T | 1485 |
| 1241470 | 5272 | 5287 | 224 | 239 | AAAGTTCTCCTGTTGG | 59 | T | 1486 |
| 1241494 | 5737 | 5752 | 689 | 704 | GATACCAGGCAGTGAA | 63 | T | 1487 |
| 1241518 | 5868 | 5883 | 820 | 835 | TCTAAGTGCATCTTAA | 43 | T | 1488 |
| 1241542 | 5939 | 5954 | 891 | 906 | GATCCACATGGTCTGC | 49 | T | 1489 |
| 1241566 | 5999 | 6014 | 951 | 966 | TCCACACGGCCATGGC | 48 | T | 1490 |
| 1241590 | 6057 | 6072 | 1009 | 1024 | TTCGGCTCATCTCTTT | 56 | T | 1491 |
| 1241614 | 10291 | 10306 | 1091 | 1106 | TAAACCCATCCACTCC | 43 | T | 1492 |
| 1241638 | 10852 | 10867 | 1155 | 1170 | TTCTGTACTTCTTACG | 33 | T | 1493 |
| 1241662 | 10952 | 10967 | 1255 | 1270 | TTGATGAGACGCAGTC | 40 | T | 1494 |
| 1241686 | 11234 | 11249 | 1537 | 1552 | TGTGTCACAAGGCTCA | 37 | T | 1495 |
| 1241710 | 11357 | 11372 | 1660 | 1675 | GCACCTTGCAGCTCAT | 41 | T | 1496 |
| 1241734 | 11526 | 11541 | 1829 | 1844 | CCGAGGATGGTCCAGC | 54 | T | 1497 |
| 1241758 | 11897 | 11912 | 2200 | 2215 | CTGAGGTCGGACTCCT | 51 | T | 1498 |
| 1241781 | 12085 | 12100 | 2388 | 2403 | GCTTCAAACGACTCCC | 56 | T | 1499 |
| 1241805 | 12187 | 12202 | 2490 | 2505 | CCTGGTTTACCAGGCC | 71 | T | 1500 |
| 1241828 | 12294 | 12309 | 2597 | 2612 | CTGCAGCTTTTTAGCT | 71 | T | 1501 |
| 1241852 | 12406 | 12421 | 2709 | 2724 | TGGTGGAGAGATTGAT | 68 | T | 1502 |
| 1241876 | 12526 | 12541 | 2829 | 2844 | GTCGGCCTTCCTTTTC | 67 | T | 1503 |
| 1241900 | 12555 | 12570 | 2858 | 2873 | TGGGAGGACACACTGC | 54 | T | 1504 |
| 1241924 | 16647 | 16662 | 2965 | 2980 | TCAGTTAGACTCTGGC | 42 | T | 1505 |
| 1241948 | 21118 | 21133 | 3089 | 3104 | GCACTCATGCGAGAGG | 55 | T | 1506 |
| 1241972 | 22990 | 23005 | 3265 | 3280 | TGACAACATGCTGATG | 67 | T | 1507 |
| 1241996 | 23029 | 23044 | 3304 | 3319 | GTCAGGGAATGGCTGG | 61 | T | 1508 |
| 1242020 | 23077 | 23092 | 3352 | 3367 | ATTGCGACTCCTGAGT | 48 | T | 1509 |
| 1242044 | 30975 | 30990 | 3419 | 3434 | AAGGCCAGAATTCACC | 59 | T | 1510 |
| 1242068 | 31025 | 31040 | 3469 | 3484 | TTCTGATTAGTGCTGA | 56 | T | 1511 |
| 1242092 | 31076 | 31091 | 3520 | 3535 | TTGATCCCCTTGTCTC | 72 | T | 1512 |
| 1242116 | 31657 | 31672 | 3593 | 3608 | CGTGAGGTTGCAGTTG | 49 | T | 1513 |
| 1242140 | N/A | N/A | 3753 | 3768 | TTTCAGACAACCCCAG | 22† | T | 1514 |
| 1242164 | 35576 | 35591 | 3929 | 3944 | CCTGGATGGATCGCAG | 75 | T | 1515 |
| 1242188 | 35728 | 35743 | 4081 | 4096 | CTGTGATGACAACAAC | 108 | T | 1516 |
| 1242212 | 35880 | 35895 | 4233 | 4248 | GGGAATGATGATATGA | 126 | T | 1517 |
| 1242236 | 35925 | 35940 | 4278 | 4293 | ATAGTCAACTAGTTCT | 66 | T | 1518 |
| 1242260 | N/A | N/A | N/A | N/A | AAGGTTTCCCCAGATG | 92 | T | 1519 |
| 1242284 | 6945 | 6960 | N/A | N/A | ACCGTATGATTCAGAA | 53 | T | 1520 |
| 1242308 | 8279 | 8294 | N/A | N/A | TGTCATTACACCCACA | 79 | T | 1521 |
| 1242332 | 8848 | 8863 | N/A | N/A | GACAGTAAATTAGCCA | 49 | T | 1522 |
| 1242356 | 9784 | 9799 | N/A | N/A | ATCCATTTTACACACG | 38 | T | 1523 |
| 1242380 | 10563 | 10578 | N/A | N/A | TGCCTTATCAAACTTG | 59 | T | 1524 |
| 1242404 | 12843 | 12858 | N/A | N/A | CTACTTAATACCTTGT | 73 | T | 1525 |
| 1242428 | 14298 | 14313 | N/A | N/A | CCAAAATCCATACGCT | 69 | T | 1526 |
| 1242452 | 14499 | 14514 | N/A | N/A | GTGCTATCTAGAGAAA | 33 | T | 1527 |
| | 14645 | 14660 | | | | | | |
| | 14718 | 14733 | | | | | | |
| | 14791 | 14806 | | | | | | |
| | 14937 | 14952 | | | | | | |
| | 15010 | 15025 | | | | | | |
| | 15083 | 15098 | | | | | | |
| 1242476 | 14574 | 14589 | N/A | N/A | AGGTGCCATCTAGAGG | 19 | T | 1528 |
| | 14866 | 14881 | | | | | | |
| | 15156 | 15171 | | | | | | |
| | 15229 | 15244 | | | | | | |
| 1242500 | 14668 | 14683 | N/A | N/A | AGTCTGTCCTCAGAGG | 12 | T | 1529 |
| | 14741 | 14756 | | | | | | |
| | 14814 | 14829 | | | | | | |
| | 14960 | 14975 | | | | | | |
| | 15033 | 15048 | | | | | | |
| 1242524 | 15336 | 15351 | N/A | N/A | CATACAAAGCAAGCTC | 49 | T | 1530 |
| 1242548 | 17674 | 17689 | N/A | N/A | AAATGGAATATATCGA | 82 | T | 1531 |
| 1242572 | 18856 | 18871 | N/A | N/A | TGCAGTAACATATCCA | 22 | T | 1532 |
| 1242596 | 19799 | 19814 | N/A | N/A | ACTATACTTTATCCCT | 61 | T | 1533 |
| 1242620 | 20596 | 20611 | N/A | N/A | TCAGAATACACCTGAC | 75 | T | 1534 |
| 1242644 | 20894 | 20909 | N/A | N/A | AGCATCAGAACACATC | 36 | T | 1535 |
| | 20978 | 20993 | | | | | | |
| 1242668 | 22375 | 22390 | N/A | N/A | GCTGAATGTACATATA | 42 | T | 1536 |
| 1242691 | 22795 | 22810 | N/A | N/A | GGAATAACAAGTAAGC | 41 | T | 1537 |
| 1242715 | 23384 | 23399 | N/A | N/A | AGGCAATTGGGCTGCA | 34 | T | 1538 |
| 1242739 | 23693 | 23708 | N/A | N/A | CAGGAGGTAAAACATC | 79 | T | 1539 |
| 1242763 | 24088 | 24103 | N/A | N/A | CTCCTAAGGCAATGCA | 46 | T | 1540 |
| 1242787 | 24365 | 24380 | N/A | N/A | TGGATTAGTGGATTAC | 56 | T | 1541 |
| 1242811 | 24786 | 24801 | N/A | N/A | GCAGAGAAGCACCCCT | 66 | T | 1542 |
| 1242835 | 25822 | 25837 | N/A | N/A | GATATGTTTACACCAA | 24 | T | 1543 |
| 1242859 | 26146 | 26161 | N/A | N/A | GATATAAATACCACCC | 93 | T | 1544 |
| 1242883 | 26685 | 26700 | N/A | N/A | ATAGATAGGGTGTTAT | 109 | T | 1545 |
| 1242907 | 27023 | 27038 | N/A | N/A | AGGCTATACCTAACAC | 21 | T | 1546 |
| | 27059 | 27074 | | | | | | |
| | 27095 | 27110 | | | | | | |
| | 27113 | 27128 | | | | | | |
| 1242931 | 27379 | 27394 | N/A | N/A | AACCGAAAGCAGAGCA | 72 | T | 1547 |
| 1242955 | 28557 | 28572 | N/A | N/A | ATTAACTACCTGCCTA | 121 | T | 1548 |
| 1242979 | 28757 | 28772 | N/A | N/A | TATTAAGCAACGGTTA | 113 | T | 1549 |
| 1243003 | 29074 | 29089 | N/A | N/A | TACTAAGCTCTCATCC | 86 | T | 1550 |
| 1243027 | 29418 | 29433 | N/A | N/A | TCTAAAATCACTGGTG | 65 | T | 1551 |
| 1243051 | 30284 | 30299 | N/A | N/A | CATGATTGCGCTGCCA | 50 | T | 1552 |
| 1243075 | 31323 | 31338 | N/A | N/A | GATGGTAAGGACTCAA | 43 | T | 1553 |
| 1243099 | 32574 | 32589 | N/A | N/A | GCAATATCCTGACACA | 58 | T | 1554 |
| 1243123 | 33719 | 33734 | N/A | N/A | CATAGCACATAAGATG | 91 | T | 1555 |
| 1243147 | 34087 | 34102 | N/A | N/A | GAGAAAACGGGTTGAT | 69 | T | 1556 |
| 1243171 | 34374 | 34389 | N/A | N/A | TAGAGTTAGATGAAGT | 56 | T | 1557 |
| 1243195 | 34485 | 34500 | N/A | N/A | TCTCAATTTGGTGGTG | 64 | T | 1558 |
| 1243219 | 34876 | 34891 | N/A | N/A | GACAATTAAACAGGTC | 81 | T | 1559 |
| 1243243 | 23380 | 23395 | N/A | N/A | AATTGGGCTGCACCAT | 54 | T | 1560 |
| 1232737 | 5138 | 5153 | 90 | 105 | ATGCCATCTTGACCCA | 60 | U | 22 |
| 1241423 | 5108 | 5123 | 60 | 75 | TTTGTCCCGTTGATTA | 70 | U | 1561 |
| 1241447 | 5186 | 5201 | 138 | 153 | TCCATAAACAGGATTG | 61 | U | 1562 |
| 1241471 | 5273 | 5288 | 225 | 240 | GAAAGTTCTCCTGTTG | 58 | U | 1563 |
| 1241495 | 5738 | 5753 | 690 | 705 | AGATACCAGGCAGTGA | 60 | U | 1564 |
| 1241519 | 5869 | 5884 | 821 | 836 | CTCTAAGTGCATCTTA | 51 | U | 1565 |
| 1241543 | 5940 | 5955 | 892 | 907 | AGATCCACATGGTCTG | 64 | U | 1566 |
| 1241567 | 6001 | 6016 | 953 | 968 | GATCCACACGGCCATG | 54 | U | 1567 |
| 1241591 | 6058 | 6073 | 1010 | 1025 | CTTCGGCTCATCTCTT | 51 | U | 1568 |
| 1241615 | 10292 | 10307 | 1092 | 1107 | GTAAACCCATCCACTC | 55 | U | 1569 |
| 1241639 | 10858 | 10873 | 1161 | 1176 | CGTACTTTCTGTACTT | 83 | U | 1570 |
| 1241663 | 10954 | 10969 | 1257 | 1272 | CCTTGATGAGACGCAG | 45 | U | 1571 |
| 1241687 | 11235 | 11250 | 1538 | 1553 | CTGTGTCACAAGGCTC | 26 | U | 1572 |
| 1241711 | 11364 | 11379 | 1667 | 1682 | GTCAAAGGCACCTTGC | 52 | U | 1573 |
| 1241735 | 11557 | 11572 | 1860 | 1875 | TGGCCTCGGAGAAACC | 91 | U | 1574 |
| 1241759 | 11902 | 11917 | 2205 | 2220 | GATTCCTGAGGTCGGA | 47 | U | 1575 |
| 1241782 | 12088 | 12103 | 2391 | 2406 | GAAGCTTCAAACGACT | 83 | U | 1576 |
| 1241806 | 12188 | 12203 | 2491 | 2506 | TCCTGGTTTACCAGGC | 98 | U | 1577 |
| 1241829 | 12295 | 12310 | 2598 | 2613 | TCTGCAGCTTTTTAGC | 64 | U | 1578 |
| 1241853 | 12408 | 12423 | 2711 | 2726 | TCTGGTGGAGAGATTG | 73 | U | 1579 |
| 1241877 | 12527 | 12542 | 2830 | 2845 | TGTCGGCCTTCCTTTT | 89 | U | 1580 |
| 1241901 | 12556 | 12571 | 2859 | 2874 | TTGGGAGGACACACTG | 48 | U | 1581 |
| 1241925 | 16648 | 16663 | 2966 | 2981 | TTCAGTTAGACTCTGG | 49 | U | 1582 |
| 1241949 | 21120 | 21135 | 3091 | 3106 | CAGCACTCATGCGAGA | 75 | U | 1583 |
| 1241973 | 22991 | 23006 | 3266 | 3281 | CTGACAACATGCTGAT | 51 | U | 1584 |
| 1241997 | 23032 | 23047 | 3307 | 3322 | CTGGTCAGGGAATGGC | 41 | U | 1585 |
| 1242021 | 23087 | 23102 | 3362 | 3377 | TTCACATAAAATTGCG | 49 | U | 1586 |
| 1242045 | 30976 | 30991 | 3420 | 3435 | TAAGGCCAGAATTCAC | 61 | U | 1587 |
| 1242069 | 31027 | 31042 | 3471 | 3486 | GATTCTGATTAGTGCT | 66 | U | 1588 |
| 1242093 | 31077 | 31092 | 3521 | 3536 | TTTGATCCCCTTGTCT | 90 | U | 1589 |
| 1242117 | 31683 | 31698 | 3619 | 3634 | GTGGAAAGATCCCAGC | 50 | U | 1590 |
| 1242141 | N/A | N/A | 3754 | 3769 | ATTTCAGACAACCCCA | 31† | U | 1591 |
| 1242165 | 35577 | 35592 | 3930 | 3945 | GCCTGGATGGATCGCA | 65 | U | 1592 |
| 1242189 | 35743 | 35758 | 4096 | 4111 | CCTCTAACTGAGGCGC | 57 | U | 1593 |
| 1242213 | 35883 | 35898 | 4236 | 4251 | AGCGGGAATGATGATA | 80 | U | 1594 |
| 1242237 | 35927 | 35942 | 4280 | 4295 | ATATAGTCAACTAGTT | 90 | U | 1595 |
| 1242261 | N/A | N/A | N/A | N/A | GAAGAAAGGTTTCCCC | 77 | U | 1596 |
| 1242285 | 6956 | 6971 | N/A | N/A | TTAACAGAATTACCGT | 50 | U | 1597 |
| 1242309 | 8477 | 8492 | N/A | N/A | ATAAGTACTGACACAA | 52 | U | 1598 |
| 1242333 | 9223 | 9238 | N/A | N/A | CCTAACTAATGTTTGC | 86 | U | 1599 |
| 1242357 | 9824 | 9839 | N/A | N/A | GCTAAGAAAGGTCACC | 64 | U | 1600 |
| 1242381 | 10580 | 10595 | N/A | N/A | AAGTAATCTGCATCCT | 71 | U | 1601 |
| 1242405 | 12844 | 12859 | N/A | N/A | CCTACTTAATACCTTG | 42 | U | 1602 |
| 1242429 | 14299 | 14314 | N/A | N/A | CCCAAAATCCATACGC | 58 | U | 1603 |
| 1242453 | 14500 | 14515 | N/A | N/A | GGTGCTATCTAGAGAA | 21 | U | 1604 |
| | 14646 | 14661 | | | | | | |
| | 14719 | 14734 | | | | | | |
| | 14792 | 14807 | | | | | | |
| | 14938 | 14953 | | | | | | |
| | 15011 | 15026 | | | | | | |
| | 15084 | 15099 | | | | | | |
| 1242477 | 14575 | 14590 | N/A | N/A | CAGGTGCCATCTAGAG | 25 | U | 1605 |
| | 14867 | 14882 | | | | | | |
| | 15157 | 15172 | | | | | | |
| | 15230 | 15245 | | | | | | |
| 1242501 | 14673 | 14688 | N/A | N/A | ATCAGAGTCTGTCCTC | 15 | U | 1606 |
| | 14819 | 14834 | | | | | | |
| | 14965 | 14980 | | | | | | |
| 1242525 | 15378 | 15393 | N/A | N/A | CTAATAGATGCTCAGG | 35 | U | 1607 |
| 1242549 | 17675 | 17690 | N/A | N/A | GAAATGGAATATATCG | 59 | U | 1608 |
| 1242573 | 18880 | 18895 | N/A | N/A | GTAAAAGCCCAGACAC | 69 | U | 1609 |
| 1242597 | 19880 | 19895 | N/A | N/A | GATTAGTTTCCCCGTC | 39 | U | 1610 |
| 1242621 | 20597 | 20612 | N/A | N/A | ATCAGAATACACCTGA | 68 | U | 1611 |
| 1242645 | 20928 | 20943 | N/A | N/A | AACACACCTGACCAGA | 29 | U | 1612 |
| | 21054 | 21069 | | | | | | |
| 1242669 | 22432 | 22447 | N/A | N/A | AGCATAATGTCCCCGA | 28 | U | 1613 |
| 1242692 | 22797 | 22812 | N/A | N/A | GTGGAATAACAAGTAA | 83 | U | 1614 |
| 1242716 | 23425 | 23440 | N/A | N/A | CTATTCATGTGAGTGT | 43 | U | 1615 |
| 1242740 | 23709 | 23724 | N/A | N/A | CCATAGTTCTCTGCAA | 57 | U | 1616 |
| 1242764 | 24101 | 24116 | N/A | N/A | CCATTAGCAACATCTC | 37 | U | 1617 |
| 1242788 | 24370 | 24385 | N/A | N/A | AATTATGGATTAGTGG | 72 | U | 1618 |
| 1242812 | 24787 | 24802 | N/A | N/A | AGCAGAGAAGCACCCC | 45 | U | 1619 |
| 1242836 | 25825 | 25840 | N/A | N/A | TATGATATGTTTACAC | 93 | U | 1620 |
| 1242860 | 26195 | 26210 | N/A | N/A | GTATTACAAATGCAAC | 89 | U | 1621 |
| 1242884 | 26687 | 26702 | N/A | N/A | CAATAGATAGGGTGTT | 48 | U | 1622 |
| 1242908 | 27100 | 27115 | N/A | N/A | CACATAGGCTATACCT | 40 | U | 1623 |
| | 27118 | 27133 | | | | | | |
| 1242932 | 27391 | 27406 | N/A | N/A | AGTGGTAGAGGGAACC | 76 | U | 1624 |
| 1242956 | 28558 | 28573 | N/A | N/A | TATTAACTACCTGCCT | 71 | U | 1625 |
| 1242980 | 28762 | 28777 | N/A | N/A | GTAACTATTAAGCAAC | 68 | U | 1626 |
| 1243004 | 29075 | 29090 | N/A | N/A | CTACTAAGCTCTCATC | 80 | U | 1627 |
| 1243028 | 29419 | 29434 | N/A | N/A | CTCTAAAATCACTGGT | 81 | U | 1628 |
| 1243052 | 30503 | 30518 | N/A | N/A | GCTGATTTAAACATCA | 77 | U | 1629 |
| 1243076 | 31332 | 31347 | N/A | N/A | GAAAACTGTGATGGTA | 51 | U | 1630 |
| 1243100 | 32575 | 32590 | N/A | N/A | GGCAATATCCTGACAC | 57 | U | 1631 |
| 1243124 | 33777 | 33792 | N/A | N/A | GACTAATGGAATTTAT | 87 | U | 1632 |
| 1243148 | 34089 | 34104 | N/A | N/A | CTGAGAAAACGGGTTG | 57 | U | 1633 |
| 1243172 | 34376 | 34391 | N/A | N/A | GTTAGAGTTAGATGAA | 60 | U | 1634 |
| 1243196 | 34525 | 34540 | N/A | N/A | CTAATAAATCCACCCA | 70 | U | 1635 |
| 1243220 | 34889 | 34904 | N/A | N/A | ATTACCCAAGTTCGAC | 56 | U | 1636 |
| 1243244 | 10356 | 10371 | N/A | N/A | AAGCACCACCCCAGTC | 88 | U | 1637 |
| 1232737 | 5138 | 5153 | 90 | 105 | ATGCCATCTTGACCCA | 51 | V | 22 |
| 1241424 | 5109 | 5124 | 61 | 76 | TTTTGTCCCGTTGATT | 62 | V | 1638 |
| 1241448 | 5187 | 5202 | 139 | 154 | ATCCATAAACAGGATT | 89 | V | 1639 |
| 1241472 | 5278 | 5293 | 230 | 245 | TACCAGAAAGTTCTCC | 57 | V | 1640 |
| 1241496 | 5739 | 5754 | 691 | 706 | AAGATACCAGGCAGTG | 49 | V | 1641 |
| 1241520 | 5870 | 5885 | 822 | 837 | CCTCTAAGTGCATCTT | 35 | V | 1642 |
| 1241544 | 5941 | 5956 | 893 | 908 | TAGATCCACATGGTCT | 78 | V | 1643 |
| 1241568 | 6002 | 6017 | 954 | 969 | AGATCCACACGGCCAT | 38 | V | 1644 |
| 1241592 | 6061 | 6076 | 1013 | 1028 | CCACTTCGGCTCATCT | 49 | V | 1645 |
| 1241616 | 10293 | 10308 | 1093 | 1108 | AGTAAACCCATCCACT | 78 | V | 1646 |
| 1241640 | 10872 | 10887 | 1175 | 1190 | GAATCTGCTTCTCACG | 36 | V | 1647 |
| 1241664 | 10955 | 10970 | 1258 | 1273 | TCCTTGATGAGACGCA | 38 | V | 1648 |
| 1241688 | 11236 | 11251 | 1539 | 1554 | TCTGTGTCACAAGGCT | 28 | V | 1649 |
| 1241712 | 11379 | 11394 | 1682 | 1697 | CGGTCCTATGTGCTCG | 56 | V | 1650 |
| 1241736 | 11565 | 11580 | 1868 | 1883 | TTTCCTTTTGGCCTCG | 59 | V | 1651 |
| 1241760 | 11904 | 11919 | 2207 | 2222 | ATGATTCCTGAGGTCG | 44 | V | 1652 |
| 1241783 | 12089 | 12104 | 2392 | 2407 | GGAAGCTTCAAACGAC | 71 | V | 1653 |
| 1241807 | 12189 | 12204 | 2492 | 2507 | CTCCTGGTTTACCAGG | 75 | V | 1654 |
| 1241830 | 12298 | 12313 | 2601 | 2616 | GGATCTGCAGCTTTTT | 43 | V | 1655 |
| 1241854 | 12413 | 12428 | 2716 | 2731 | TCCATTCTGGTGGAGA | 51 | V | 1656 |
| 1241878 | 12528 | 12543 | 2831 | 2846 | GTGTCGGCCTTCCTTT | 49 | V | 1657 |
| 1241902 | 12557 | 12572 | 2860 | 2875 | CTTGGGAGGACACACT | 73 | V | 1658 |
| 1241926 | 16649 | 16664 | 2967 | 2982 | ATTCAGTTAGACTCTG | 83 | V | 1659 |
| 1241950 | 21130 | 21145 | 3101 | 3116 | GATGTCGAAGCAGCAC | 52 | V | 1660 |
| 1241974 | 22994 | 23009 | 3269 | 3284 | ATCCTGACAACATGCT | 46 | V | 1661 |
| 1241998 | 23033 | 23048 | 3308 | 3323 | TCTGGTCAGGGAATGG | 36 | V | 1662 |
| 1242022 | 23103 | 23118 | 3378 | 3393 | GTGGATTCTTGGCTTT | 49 | V | 1663 |
| 1242046 | 30977 | 30992 | 3421 | 3436 | GTAAGGCCAGAATTCA | 41 | V | 1664 |
| 1242070 | 31028 | 31043 | 3472 | 3487 | AGATTCTGATTAGTGC | 51 | V | 1665 |
| 1242094 | 31078 | 31093 | 3522 | 3537 | GTTTGATCCCCTTGTC | 42 | V | 1666 |
| 1242118 | 31685 | 31700 | 3621 | 3636 | GTGTGGAAAGATCCCA | 32 | V | 1667 |
| 1242142 | N/A | N/A | 3755 | 3770 | CATTTCAGACAACCCC | 41† | V | 1668 |
| 1242166 | 35604 | 35619 | 3957 | 3972 | CGGAAGGATCACAGAG | 72 | V | 1669 |
| 1242190 | 35744 | 35759 | 4097 | 4112 | TCCTCTAACTGAGGCG | 56 | V | 1670 |
| 1242214 | 35892 | 35907 | 4245 | 4260 | TAGAAAGATAGCGGGA | 113 | V | 1671 |
| 1242238 | 35928 | 35943 | 4281 | 4296 | TATATAGTCAACTAGT | 55 | V | 1672 |
| 1242262 | 6124 | 6139 | N/A | N/A | GGAAAATTGTACACTA | 41 | V | 1673 |
| 1242286 | 6980 | 6995 | N/A | N/A | CAGTAGAGCAGTTCTT | 54 | V | 1674 |
| 1242310 | 8479 | 8494 | N/A | N/A | ATATAAGTACTGACAC | 55 | V | 1675 |
| 1242334 | 9405 | 9420 | N/A | N/A | CAGGAATCTACAAGTA | 70 | V | 1676 |
| 1242358 | 9847 | 9862 | N/A | N/A | CTATATCCCCAACACG | 78 | V | 1677 |
| 1242382 | 10582 | 10597 | N/A | N/A | TTAAGTAATCTGCATC | 78 | V | 1678 |
| 1242406 | 12858 | 12873 | N/A | N/A | AGGCAATCCTACATCC | 73 | V | 1679 |
| 1242430 | 14374 | 14389 | N/A | N/A | AATGAGTAGTTCTGCC | 55 | V | 1680 |
| 1242454 | 14501 | 14516 | N/A | N/A | AGGTGCTATCTAGAGA | 12 | V | 1681 |
| | 14647 | 14662 | | | | | | |
| | 14720 | 14735 | | | | | | |
| | 14793 | 14808 | | | | | | |
| | 14939 | 14954 | | | | | | |
| | 15012 | 15027 | | | | | | |
| | 15085 | 15100 | | | | | | |
| 1242478 | 14576 | 14591 | N/A | N/A | GCAGGTGCCATCTAGA | 33 | V | 1682 |
| | 14868 | 14883 | | | | | | |
| | 15158 | 15173 | | | | | | |
| | 15231 | 15246 | | | | | | |
| 1242502 | 14674 | 14689 | N/A | N/A | AATCAGAGTCTGTCCT | 42 | V | 1683 |
| | 14820 | 14835 | | | | | | |
| | 14966 | 14981 | | | | | | |
| 1242526 | 15381 | 15396 | N/A | N/A | TTTCTAATAGATGCTC | 42 | V | 1684 |
| 1242550 | 17694 | 17709 | N/A | N/A | TATGAACATGGCCCAT | 54 | V | 1685 |
| 1242574 | 19268 | 19283 | N/A | N/A | GACACTAGAGCCTCAG | 28 | V | 1686 |
| 1242598 | 19882 | 19897 | N/A | N/A | TTGATTAGTTTCCCCG | 18 | V | 1687 |
| 1242622 | 20598 | 20613 | N/A | N/A | CATCAGAATACACCTG | 66 | V | 1688 |
| 1242646 | 20929 | 20944 | N/A | N/A | GAACACACCTGACCAG | 37 | V | 1689 |
| | 21055 | 21070 | | | | | | |
| 1242670 | 22433 | 22448 | N/A | N/A | TAGCATAATGTCCCCG | 36 | V | 1690 |
| 1242693 | 22829 | 22844 | N/A | N/A | CTATGTACACTTCTGA | 45 | V | 1691 |
| 1242717 | 23427 | 23442 | N/A | N/A | GACTATTCATGTGAGT | 64 | V | 1692 |
| 1242741 | 23711 | 23726 | N/A | N/A | AACCATAGTTCTCTGC | 51 | V | 1693 |
| 1242765 | 24114 | 24129 | N/A | N/A | CCCTGTAGAGAGCCCA | 65 | V | 1694 |
| 1242789 | 24371 | 24386 | N/A | N/A | TAATTATGGATTAGTG | 79 | V | 1695 |
| 1242813 | 24788 | 24803 | N/A | N/A | GAGCAGAGAAGCACCC | 64 | V | 1696 |
| 1242837 | 25826 | 25841 | N/A | N/A | CTATGATATGTTTACA | 82 | V | 1697 |
| 1242861 | 26233 | 26248 | N/A | N/A | CTCTAACAGACTAGGC | 54 | V | 1698 |
| 1242885 | 26688 | 26703 | N/A | N/A | TCAATAGATAGGGTGT | 34 | V | 1699 |
| 1242909 | 27101 | 27116 | N/A | N/A | ACACATAGGCTATACC | 66 | V | 1700 |
| | 27119 | 27134 | | | | | | |
| 1242933 | 27454 | 27469 | N/A | N/A | TTTGAACAAAGGGTCA | 60 | V | 1701 |
| 1242957 | 28586 | 28601 | N/A | N/A | TTAAGTTAATTGGTTG | 65 | V | 1702 |
| 1242981 | 28787 | 28802 | N/A | N/A | TCATATCCAAATTGTG | 67 | V | 1703 |
| 1243005 | 29076 | 29091 | N/A | N/A | TCTACTAAGCTCTCAT | 54 | V | 1704 |
| 1243029 | 29420 | 29435 | N/A | N/A | GCTCTAAAATCACTGG | 59 | V | 1705 |
| 1243053 | 30606 | 30621 | N/A | N/A | AACTAATAATCCCCGT | 85 | V | 1706 |
| 1243077 | 31371 | 31386 | N/A | N/A | AATGTAAGTGTCATAC | 59 | V | 1707 |
| 1243101 | 32674 | 32689 | N/A | N/A | GAAAAGTGCAATCATC | 86 | V | 1708 |
| 1243125 | 33797 | 33812 | N/A | N/A | AATATGGACAGAAGTC | 67 | V | 1709 |
| 1243149 | 34090 | 34105 | N/A | N/A | CCTGAGAAAACGGGTT | 59 | V | 1710 |
| 1243173 | 34377 | 34392 | N/A | N/A | AGTTAGAGTTAGATGA | 64 | V | 1711 |
| 1243197 | 34526 | 34541 | N/A | N/A | ACTAATAAATCCACCC | 86 | V | 1712 |
| 1243221 | 34911 | 34926 | N/A | N/A | GTATAATGAACCCCCT | 69 | V | 1713 |
| 1243245 | 32944 | 32959 | N/A | N/A | CCAAGCACGGAGACAC | 84 | V | 1714 |
| 1232737 | 5138 | 5153 | 90 | 105 | ATGCCATCTTGACCCA | 44 | W | 22 |
| 1241425 | 5110 | 5125 | 62 | 77 | TTTTTGTCCCGTTGAT | 92 | W | 1715 |
| 1241449 | 5217 | 5232 | 169 | 184 | TTCCCTATGGAGGGAA | 113 | W | 1716 |
| 1241473 | 5281 | 5296 | 233 | 248 | GCTTACCAGAAAGTTC | 49 | W | 1717 |
| 1241497 | 5740 | 5755 | 692 | 707 | TAAGATACCAGGCAGT | 73 | W | 1718 |
| 1241521 | 5871 | 5886 | 823 | 838 | TCCTCTAAGTGCATCT | 36 | W | 1719 |
| 1241545 | 5942 | 5957 | 894 | 909 | CTAGATCCACATGGTC | 58 | W | 1720 |
| 1241569 | 6003 | 6018 | 955 | 970 | AAGATCCACACGGCCA | 56 | W | 1721 |
| 1241593 | 6062 | 6077 | 1014 | 1029 | CCCACTTCGGCTCATC | 61 | W | 1722 |
| 1241617 | 10295 | 10310 | 1095 | 1110 | CCAGTAAACCCATCCA | 38 | W | 1723 |
| 1241641 | 10879 | 10894 | 1182 | 1197 | TGCACTGGAATCTGCT | 67 | W | 1724 |
| 1241665 | 10956 | 10971 | 1259 | 1274 | CTCCTTGATGAGACGC | 35 | W | 1725 |
| 1241689 | 11237 | 11252 | 1540 | 1555 | CTCTGTGTCACAAGGC | 27 | W | 1726 |
| 1241713 | 11389 | 11404 | 1692 | 1707 | CAGTGCAGAGCGGTCC | 29 | W | 1727 |
| 1241737 | 11592 | 11607 | 1895 | 1910 | ATCAGAGAAGTACTTG | 54 | W | 1728 |
| 1241761 | 11911 | 11926 | 2214 | 2229 | GCAGTCCATGATTCCT | 32 | W | 1729 |
| 1241784 | 12090 | 12105 | 2393 | 2408 | GGGAAGCTTCAAACGA | 47 | W | 1730 |
| 1241808 | 12190 | 12205 | 2493 | 2508 | TCTCCTGGTTTACCAG | 49 | W | 1731 |
| 1241831 | 12299 | 12314 | 2602 | 2617 | TGGATCTGCAGCTTTT | 35 | W | 1732 |
| 1241855 | 12415 | 12430 | 2718 | 2733 | GGTCCATTCTGGTGGA | 48 | W | 1733 |
| 1241879 | 12529 | 12544 | 2832 | 2847 | GGTGTCGGCCTTCCTT | 51 | W | 1734 |
| 1241903 | 12560 | 12575 | 2863 | 2878 | GAGCTTGGGAGGACAC | 53 | W | 1735 |
| 1241927 | 16660 | 16675 | 2978 | 2993 | ACTGAGGTCCAATTCA | 56 | W | 1736 |
| 1241951 | 21134 | 21149 | 3105 | 3120 | AGGAGATGTCGAAGCA | 61 | W | 1737 |
| 1241975 | 22995 | 23010 | 3270 | 3285 | GATCCTGACAACATGC | 51 | W | 1738 |
| 1241999 | 23034 | 23049 | 3309 | 3324 | GTCTGGTCAGGGAATG | 42 | W | 1739 |
| 1242023 | 23104 | 23119 | 3379 | 3394 | TGTGGATTCTTGGCTT | 86 | W | 1740 |
| 1242047 | 30992 | 31007 | 3436 | 3451 | GAACAACAGACTGACG | 55 | W | 1741 |
| 1242071 | 31029 | 31044 | 3473 | 3488 | GAGATTCTGATTAGTG | 22 | W | 1742 |
| 1242095 | 31079 | 31094 | 3523 | 3538 | AGTTTGATCCCCTTGT | 49 | W | 1743 |
| 1242119 | 31686 | 31701 | 3622 | 3637 | AGTGTGGAAAGATCCC | 22 | W | 1744 |
| 1242143 | 35404 | 35419 | 3757 | 3772 | TACATTTCAGACAACC | 29† | W | 1745 |
| 1242167 | 35609 | 35624 | 3962 | 3977 | TCCACCGGAAGGATCA | 56 | W | 1746 |
| 1242191 | 35749 | 35764 | 4102 | 4117 | GAACATCCTCTAACTG | 51 | W | 1747 |
| 1242215 | 35893 | 35908 | 4246 | 4261 | ATAGAAAGATAGCGGG | 102 | W | 1748 |
| 1242239 | 36019 | 36034 | 4372 | 4387 | GCTACAAAAAGCATGG | 38 | W | 1749 |
| 1242263 | 6492 | 6507 | N/A | N/A | GCACAATGTGAGTGTA | 49 | W | 1750 |
| 1242287 | 6982 | 6997 | N/A | N/A | AACAGTAGAGCAGTTC | 53 | W | 1751 |
| 1242311 | 8480 | 8495 | N/A | N/A | TATATAAGTACTGACA | 69 | W | 1752 |
| 1242335 | 9421 | 9436 | N/A | N/A | GATAACTTCAGGTGGG | 50 | W | 1753 |
| 1242359 | 9939 | 9954 | N/A | N/A | AGCAAACATGCGAAGC | 56 | W | 1754 |
| 1242383 | 10585 | 10600 | N/A | N/A | CCTTTAAGTAATCTGC | 34 | W | 1755 |
| 1242407 | 12865 | 12880 | N/A | N/A | TATTTGTAGGCAATCC | 41 | W | 1756 |
| 1242431 | 14376 | 14391 | N/A | N/A | TTAATGAGTAGTTCTG | 61 | W | 1757 |
| 1242455 | 14503 | 14518 | N/A | N/A | GAAGGTGCTATCTAGA | 13 | W | 1758 |
| | 14649 | 14664 | | | | | | |
| | 14722 | 14737 | | | | | | |
| | 14795 | 14810 | | | | | | |
| | 14941 | 14956 | | | | | | |
| | 15014 | 15029 | | | | | | |
| | 15087 | 15102 | | | | | | |
| 1242479 | 14577 | 14592 | N/A | N/A | GGCAGGTGCCATCTAG | 56 | W | 1759 |
| | 14869 | 14884 | | | | | | |
| | 15159 | 15174 | | | | | | |
| | 15232 | 15247 | | | | | | |
| 1242503 | 14675 | 14690 | N/A | N/A | CAATCAGAGTCTGTCC | 27 | W | 1760 |
| | 14821 | 14836 | | | | | | |
| | 14967 | 14982 | | | | | | |
| 1242527 | 15405 | 15420 | N/A | N/A | TAAGATTGGGTCCACA | 36 | W | 1761 |
| 1242551 | 17695 | 17710 | N/A | N/A | CTATGAACATGGCCCA | 31 | W | 1762 |
| 1242575 | 19290 | 19305 | N/A | N/A | ATCCATAGAGCATGGA | 71 | W | 1763 |
| 1242599 | 19883 | 19898 | N/A | N/A | CTTGATTAGTTTCCCC | 26 | W | 1764 |
| 1242623 | 20610 | 20625 | N/A | N/A | GAATAGAGAAAGCATC | 46 | W | 1765 |
| | 20652 | 20667 | | | | | | |
| | 20694 | 20709 | | | | | | |
| | 20736 | 20751 | | | | | | |
| | 20820 | 20835 | | | | | | |
| | 20862 | 20877 | | | | | | |
| | 20904 | 20919 | | | | | | |
| | 20988 | 21003 | | | | | | |
| 1242647 | 20930 | 20945 | N/A | N/A | AGAACACACCTGACCA | 40 | W | 1766 |
| | 21056 | 21071 | | | | | | |
| 1242671 | 22446 | 22461 | N/A | N/A | AGCTTATCTTACTTAG | 80 | W | 1767 |
| 1242694 | 22831 | 22846 | N/A | N/A | CTCTATGTACACTTCT | 36 | W | 1768 |
| 1242718 | 23440 | 23455 | N/A | N/A | ACATAAAATGGGTGAC | 59 | W | 1769 |
| 1242742 | 23713 | 23728 | N/A | N/A | GAAACCATAGTTCTCT | 34 | W | 1770 |
| 1242766 | 24123 | 24138 | N/A | N/A | ATGAAGAAGCCCTGTA | 65 | W | 1771 |
| 1242790 | 24372 | 24387 | N/A | N/A | TTAATTATGGATTAGT | 83 | W | 1772 |
| 1242814 | 24827 | 24842 | N/A | N/A | CTCCAATGTCACCCGC | 44 | W | 1773 |
| 1242838 | 25827 | 25842 | N/A | N/A | ACTATGATATGTTTAC | 68 | W | 1774 |
| 1242862 | 26243 | 26258 | N/A | N/A | ATTACAGTAGCTCTAA | 45 | W | 1775 |
| 1242886 | 26691 | 26706 | N/A | N/A | GTTTCAATAGATAGGG | 32 | W | 1776 |
| 1242910 | 27102 | 27117 | N/A | N/A | AACACATAGGCTATAC | 78 | W | 1777 |
| | 27120 | 27135 | | | | | | |
| 1242934 | 27496 | 27511 | N/A | N/A | CTAAGATGTCACTCTG | 56 | W | 1778 |
| 1242958 | 28588 | 28603 | N/A | N/A | TATTAAGTTAATTGGT | 82 | W | 1779 |
| 1242982 | 28825 | 28840 | N/A | N/A | GAAATTGCAACAGACG | 42 | W | 1780 |
| 1243006 | 29091 | 29106 | N/A | N/A | AAGTTTTGAGTGGCTT | 42 | W | 1781 |
| 1243030 | 29429 | 29444 | N/A | N/A | AGCATAAGAGCTCTAA | 92 | W | 1782 |
| 1243054 | 30608 | 30623 | N/A | N/A | TCAACTAATAATCCCC | 49 | W | 1783 |
| 1243078 | 31406 | 31421 | N/A | N/A | TACCAAATTCTGTGCC | 108 | W | 1784 |
| 1243102 | 32757 | 32772 | N/A | N/A | CTGAGTAGAAGGATCT | 41 | W | 1785 |
| 1243126 | 33874 | 33889 | N/A | N/A | CACAAGGATGCAAGGC | 43 | W | 1786 |
| 1243150 | 34103 | 34118 | N/A | N/A | CTTGTTATCGCAGCCT | 41 | W | 1787 |
| 1243174 | 34380 | 34395 | N/A | N/A | AGTAGTTAGAGTTAGA | 36 | W | 1788 |
| 1243198 | 34530 | 34545 | N/A | N/A | CTTAACTAATAAATCC | 76 | W | 1789 |
| 1243222 | 34960 | 34975 | N/A | N/A | AACTATCTAGTTGGGA | 69 | W | 1790 |
| 1243246 | 22492 | 22507 | N/A | N/A | AGACACCTCCTATAAG | 69 | W | 1791 |
| 1232737 | 5138 | 5153 | 90 | 105 | ATGCCATCTTGACCCA | 43 | X | 22 |
| 1241426 | 5115 | 5130 | 67 | 82 | GAAAATTTTTGTCCCG | 64 | X | 1792 |
| 1241450 | 5219 | 5234 | 171 | 186 | GTTTCCCTATGGAGGG | 81 | X | 1793 |
| 1241474 | 5282 | 5297 | 234 | 249 | TGCTTACCAGAAAGTT | 58 | X | 1794 |
| 1241498 | 5741 | 5756 | 693 | 708 | CTAAGATACCAGGCAG | 57 | X | 1795 |
| 1241522 | 5872 | 5887 | 824 | 839 | GTCCTCTAAGTGCATC | 67 | X | 1796 |
| 1241546 | 5943 | 5958 | 895 | 910 | GCTAGATCCACATGGT | 54 | X | 1797 |
| 1241570 | 6004 | 6019 | 956 | 971 | GAAGATCCACACGGCC | 45 | X | 1798 |
| 1241594 | 6063 | 6078 | 1015 | 1030 | CCCCACTTCGGCTCAT | 62 | X | 1799 |
| 1241618 | 10296 | 10311 | 1096 | 1111 | TCCAGTAAACCCATCC | 48 | X | 1800 |
| 1241642 | 10880 | 10895 | 1183 | 1198 | ATGCACTGGAATCTGC | 58 | X | 1801 |
| 1241666 | 10960 | 10975 | 1263 | 1278 | GGTGCTCCTTGATGAG | 74 | X | 1802 |
| 1241690 | 11238 | 11253 | 1541 | 1556 | CCTCTGTGTCACAAGG | 42 | X | 1803 |
| 1241714 | 11390 | 11405 | 1693 | 1708 | TCAGTGCAGAGCGGTC | 47 | X | 1804 |
| 1241738 | 11593 | 11608 | 1896 | 1911 | CATCAGAGAAGTACTT | 78 | X | 1805 |
| 1241762 | 11912 | 11927 | 2215 | 2230 | TGCAGTCCATGATTCC | 53 | X | 1806 |
| 1241785 | 12091 | 12106 | 2394 | 2409 | TGGGAAGCTTCAAACG | 71 | X | 1807 |
| 1241809 | 12194 | 12209 | 2497 | 2512 | GTCCTCTCCTGGTTTA | 75 | X | 1808 |
| 1241832 | 12300 | 12315 | 2603 | 2618 | CTGGATCTGCAGCTTT | 41 | X | 1809 |
| 1241856 | 12416 | 12431 | 2719 | 2734 | TGGTCCATTCTGGTGG | 61 | X | 1810 |
| 1241880 | 12530 | 12545 | 2833 | 2848 | AGGTGTCGGCCTTCCT | 67 | X | 1811 |
| 1241904 | 12562 | 12577 | 2865 | 2880 | AGGAGCTTGGGAGGAC | 95 | X | 1812 |
| 1241928 | 16668 | 16683 | 2986 | 3001 | GAATTGTCACTGAGGT | 56 | X | 1813 |
| 1241952 | 21136 | 21151 | 3107 | 3122 | CAAGGAGATGTCGAAG | 79 | X | 1814 |
| 1241976 | 22997 | 23012 | 3272 | 3287 | AAGATCCTGACAACAT | 51 | X | 1815 |
| 1242000 | 23036 | 23051 | 3311 | 3326 | GAGTCTGGTCAGGGAA | 35 | X | 1816 |
| 1242024 | 23105 | 23120 | 3380 | 3395 | CTGTGGATTCTTGGCT | 67 | X | 1817 |
| 1242048 | 30993 | 31008 | 3437 | 3452 | TGAACAACAGACTGAC | 50 | X | 1818 |
| 1242072 | 31031 | 31046 | 3475 | 3490 | GTGAGATTCTGATTAG | 38 | X | 1819 |
| 1242096 | 31080 | 31095 | 3524 | 3539 | TAGTTTGATCCCCTTG | 44 | X | 1820 |
| 1242120 | 31687 | 31702 | 3623 | 3638 | AAGTGTGGAAAGATCC | 56 | X | 1821 |
| 1242144 | 35417 | 35432 | 3770 | 3785 | CTCATAATTGAAATAC | 34† | X | 1822 |
| 1242168 | 35622 | 35637 | 3975 | 3990 | TCTTCTCCGACACTCC | 60 | X | 1823 |
| 1242192 | 35752 | 35767 | 4105 | 4120 | GAGGAACATCCTCTAA | 75 | X | 1824 |
| 1242216 | 35894 | 35909 | 4247 | 4262 | AATAGAAAGATAGCGG | 71 | X | 1825 |
| 1242240 | 36028 | 36043 | 4381 | 4396 | TTTCAACCAGCTACAA | 80 | X | 1826 |
| 1242264 | 6549 | 6564 | N/A | N/A | ATTCAATGGGTGAGGA | 79 | X | 1827 |
| 1242288 | 6986 | 7001 | N/A | N/A | CTAAAACAGTAGAGCA | 57 | X | 1828 |
| 1242312 | 8482 | 8497 | N/A | N/A | AGTATATAAGTACTGA | 71 | X | 1829 |
| 1242336 | 9422 | 9437 | N/A | N/A | AGATAACTTCAGGTGG | 51 | X | 1830 |
| 1242360 | 10144 | 10159 | N/A | N/A | ATATTTGGCATGAGAG | 60 | X | 1831 |
| 1242384 | 10599 | 10614 | N/A | N/A | GAATCAATCTTATTCC | 73 | X | 1832 |
| 1242408 | 12897 | 12912 | N/A | N/A | CAAGTAGCTTACAAGA | 56 | X | 1833 |
| 1242432 | 14377 | 14392 | N/A | N/A | CTTAATGAGTAGTTCT | 70 | X | 1834 |
| 1242456 | 14504 | 14519 | N/A | N/A | GGAAGGTGCTATCTAG | 19 | X | 1835 |
| | 14650 | 14665 | | | | | | |
| | 14723 | 14738 | | | | | | |
| | 14796 | 14811 | | | | | | |
| | 14942 | 14957 | | | | | | |
| | 15015 | 15030 | | | | | | |
| | 15088 | 15103 | | | | | | |
| 1242480 | 14578 | 14593 | N/A | N/A | AGGCAGGTGCCATCTA | 40 | X | 1836 |
| | 14870 | 14885 | | | | | | |
| | 15160 | 15175 | | | | | | |
| | 15233 | 15248 | | | | | | |
| 1242504 | 14676 | 14691 | N/A | N/A | CCAATCAGAGTCTGTC | 20 | X | 1837 |
| | 14822 | 14837 | | | | | | |
| | 14968 | 14983 | | | | | | |
| 1242528 | 15406 | 15421 | N/A | N/A | CTAAGATTGGGTCCAC | 47 | X | 1838 |
| 1242552 | 17697 | 17712 | N/A | N/A | ATCTATGAACATGGCC | 42 | X | 1839 |
| 1242576 | 19300 | 19315 | N/A | N/A | AAAGGGTAACATCCAT | 38 | X | 1840 |
| 1242600 | 20253 | 20268 | N/A | N/A | CATCTATATTGAAAGG | 48 | X | 1841 |
| 1242624 | 20632 | 20647 | N/A | N/A | CACACCTGACCAGAGA | 29 | X | 1842 |
| | 20674 | 20689 | | | | | | |
| | 20716 | 20731 | | | | | | |
| | 20758 | 20773 | | | | | | |
| | 20800 | 20815 | | | | | | |
| | 20926 | 20941 | | | | | | |
| | 21052 | 21067 | | | | | | |
| 1242648 | 20932 | 20947 | N/A | N/A | TCAGAACACACCTGAC | 65 | X | 1843 |
| | 21058 | 21073 | | | | | | |
| 1242672 | 22459 | 22474 | N/A | N/A | CCCTTTCGAGTCTAGC | 51 | X | 1844 |
| 1242695 | 22832 | 22847 | N/A | N/A | GCTCTATGTACACTTC | 25 | X | 1845 |
| 1242719 | 23466 | 23481 | N/A | N/A | TAACTTGCATGCTTGC | 108 | X | 1846 |
| 1242743 | 23760 | 23775 | N/A | N/A | CTTATGTAACTGCCAA | 43 | X | 1847 |
| 1242767 | 24124 | 24139 | N/A | N/A | GATGAAGAAGCCCTGT | 64 | X | 1848 |
| 1242791 | 24373 | 24388 | N/A | N/A | GTTAATTATGGATTAG | 72 | X | 1849 |
| 1242815 | 24958 | 24973 | N/A | N/A | GTGGAATTTGGAACCA | 43 | X | 1850 |
| 1242839 | 25829 | 25844 | N/A | N/A | GTACTATGATATGTTT | 65 | X | 1851 |
| 1242863 | 26271 | 26286 | N/A | N/A | GTTTAAGCTGCTCTGT | 55 | X | 1852 |
| 1242887 | 26704 | 26719 | N/A | N/A | TATTATGGTTCTAGTT | 60 | X | 1853 |
| 1242911 | 27103 | 27118 | N/A | N/A | TAACACATAGGCTATA | 91 | X | 1854 |
| | 27121 | 27136 | | | | | | |
| 1242935 | 27499 | 27514 | N/A | N/A | AAGCTAAGATGTCACT | 68 | X | 1855 |
| 1242959 | 28589 | 28604 | N/A | N/A | GTATTAAGTTAATTGG | 73 | X | 1856 |
| 1242983 | 28828 | 28843 | N/A | N/A | GTAGAAATTGCAACAG | 65 | X | 1857 |
| 1243007 | 29094 | 29109 | N/A | N/A | AGCAAGTTTTGAGTGG | 52 | X | 1858 |
| 1243031 | 29430 | 29445 | N/A | N/A | GAGCATAAGAGCTCTA | 98 | X | 1859 |
| 1243055 | 30609 | 30624 | N/A | N/A | CTCAACTAATAATCCC | 70 | X | 1860 |
| 1243079 | 31417 | 31432 | N/A | N/A | GTTCATTGATTTACCA | 43 | X | 1861 |
| 1243103 | 32892 | 32907 | N/A | N/A | ACATATCATGAAGCCA | 80 | X | 1862 |
| 1243127 | 33875 | 33890 | N/A | N/A | GCACAAGGATGCAAGG | 78 | X | 1863 |
| 1243151 | 34112 | 34127 | N/A | N/A | CTAAAGCAGCTTGTTA | 66 | X | 1864 |
| 1243175 | 34382 | 34397 | N/A | N/A | GAAGTAGTTAGAGTTA | 49 | X | 1865 |
| 1243199 | 34534 | 34549 | N/A | N/A | GCAACTTAACTAATAA | 65 | X | 1866 |
| 1243223 | 34963 | 34978 | N/A | N/A | TTTAACTATCTAGTTG | 82 | X | 1867 |
| 1243247 | 13244 | 13259 | N/A | N/A | GGCCTAGAAAGAGGGT | 64 | X | 1868 |
| 1232737 | 5138 | 5153 | 90 | 105 | ATGCCATCTTGACCCA | 60 | Y | 22 |
| 1241427 | 5128 | 5143 | 80 | 95 | GACCCATCAGCAAGAA | 56 | Y | 1869 |
| 1241451 | 5220 | 5235 | 172 | 187 | GGTTTCCCTATGGAGG | 87 | Y | 1870 |
| 1241475 | 5287 | 5302 | 239 | 254 | CCAAATGCTTACCAGA | 42 | Y | 1871 |
| 1241499 | 5743 | 5758 | 695 | 710 | CACTAAGATACCAGGC | 66 | Y | 1872 |
| 1241523 | 5873 | 5888 | 825 | 840 | AGTCCTCTAAGTGCAT | 55 | Y | 1873 |
| 1241547 | 5944 | 5959 | 896 | 911 | GGCTAGATCCACATGG | 71 | Y | 1874 |
| 1241571 | 6005 | 6020 | 957 | 972 | CGAAGATCCACACGGC | 60 | Y | 1875 |
| 1241595 | N/A | N/A | 1020 | 1035 | CTGAACCCCACTTCGG | 117 | Y | 1876 |
| 1241619 | 10297 | 10312 | 1097 | 1112 | CTCCAGTAAACCCATC | 59 | Y | 1877 |
| 1241643 | 10881 | 10896 | 1184 | 1199 | AATGCACTGGAATCTG | 31 | Y | 1878 |
| 1241667 | 11002 | 11017 | 1305 | 1320 | TGCCGATGGCCAGAAG | 64 | Y | 1879 |
| 1241691 | 11258 | 11273 | 1561 | 1576 | ATGATCAGGTCCCCCA | 41 | Y | 1880 |
| 1241715 | 11391 | 11406 | 1694 | 1709 | GTCAGTGCAGAGCGGT | 39 | Y | 1881 |
| 1241739 | 11595 | 11610 | 1898 | 1913 | CTCATCAGAGAAGTAC | 57 | Y | 1882 |
| 1241763 | 11922 | 11937 | 2225 | 2240 | ATCCGCCTTCTGCAGT | 69 | Y | 1883 |
| 1241786 | 12095 | 12110 | 2398 | 2413 | CGGCTGGGAAGCTTCA | 57 | Y | 1884 |
| 1241810 | 12195 | 12210 | 2498 | 2513 | GGTCCTCTCCTGGTTT | 70 | Y | 1885 |
| 1241833 | 12320 | 12335 | 2623 | 2638 | AACAATTCCAGCTGGC | 52 | Y | 1886 |
| 1241857 | 12417 | 12432 | 2720 | 2735 | GTGGTCCATTCTGGTG | 58 | Y | 1887 |
| 1241881 | 12531 | 12546 | 2834 | 2849 | AAGGTGTCGGCCTTCC | 49 | Y | 1888 |
| 1241905 | 12568 | 12583 | 2871 | 2886 | CATGAGAGGAGCTTGG | 83 | Y | 1889 |
| 1241929 | 16669 | 16684 | 2987 | 3002 | AGAATTGTCACTGAGG | 32 | Y | 1890 |
| 1241953 | 21140 | 21155 | 3111 | 3126 | GGACCAAGGAGATGTC | 102 | Y | 1891 |
| 1241977 | 22998 | 23013 | 3273 | 3288 | CAAGATCCTGACAACA | 74 | Y | 1892 |
| 1242001 | 23038 | 23053 | 3313 | 3328 | TAGAGTCTGGTCAGGG | 27 | Y | 1893 |
| 1242025 | 23106 | 23121 | 3381 | 3396 | ACTGTGGATTCTTGGC | 42 | Y | 1894 |
| 1242049 | 30995 | 31010 | 3439 | 3454 | GCTGAACAACAGACTG | 39 | Y | 1895 |
| 1242073 | 31032 | 31047 | 3476 | 3491 | CGTGAGATTCTGATTA | 39 | Y | 1896 |
| 1242097 | 31081 | 31096 | 3525 | 3540 | GTAGTTTGATCCCCTT | 38 | Y | 1897 |
| 1242121 | 31693 | 31708 | 3629 | 3644 | GGTCAGAAGTGTGGAA | 76 | Y | 1898 |
| 1242145 | 35419 | 35434 | 3772 | 3787 | GTCTCATAATTGAAAT | 31† | Y | 1899 |
| 1242169 | 35629 | 35644 | 3982 | 3997 | CAAGCTCTCTTCTCCG | 41 | Y | 1900 |
| 1242193 | 35753 | 35768 | 4106 | 4121 | AGAGGAACATCCTCTA | 100 | Y | 1901 |
| 1242217 | 35895 | 35910 | 4248 | 4263 | TAATAGAAAGATAGCG | 111 | Y | 1902 |
| 1242241 | 36030 | 36045 | 4383 | 4398 | ATTTTCAACCAGCTAC | 48 | Y | 1903 |
| 1242265 | 6553 | 6568 | N/A | N/A | TATCATTCAATGGGTG | 54 | Y | 1904 |
| 1242289 | 6987 | 7002 | N/A | N/A | TCTAAAACAGTAGAGC | 60 | Y | 1905 |
| 1242313 | 8510 | 8525 | N/A | N/A | GATTATGACACTTTCA | 75 | Y | 1906 |
| 1242337 | 9425 | 9440 | N/A | N/A | GACAGATAACTTCAGG | 59 | Y | 1907 |
| 1242361 | 10147 | 10162 | N/A | N/A | CTAATATTTGGCATGA | 68 | Y | 1908 |
| 1242385 | 10613 | 10628 | N/A | N/A | CCCAAAGATCATTTGA | 104 | Y | 1909 |
| 1242409 | 12899 | 12914 | N/A | N/A | TCCAAGTAGCTTACAA | 77 | Y | 1910 |
| 1242433 | 14380 | 14395 | N/A | N/A | ACTCTTAATGAGTAGT | 120 | Y | 1911 |
| 1242457 | 14505 | 14520 | N/A | N/A | AGGAAGGTGCTATCTA | 17 | Y | 1912 |
| | 14651 | 14666 | | | | | | |
| | 14724 | 14739 | | | | | | |
| | 14797 | 14812 | | | | | | |
| | 14943 | 14958 | | | | | | |
| | 15016 | 15031 | | | | | | |
| | 15089 | 15104 | | | | | | |
| 1242481 | 14580 | 14595 | N/A | N/A | TAAGGCAGGTGCCATC | 26 | Y | 1913 |
| | 14872 | 14887 | | | | | | |
| | 15162 | 15177 | | | | | | |
| | 15235 | 15250 | | | | | | |
| 1242505 | 14677 | 14692 | N/A | N/A | TCCAATCAGAGTCTGT | 31 | Y | 1914 |
| | 14823 | 14838 | | | | | | |
| | 14969 | 14984 | | | | | | |
| 1242529 | 15407 | 15422 | N/A | N/A | TCTAAGATTGGGTCCA | 47 | Y | 1915 |
| 1242553 | 17698 | 17713 | N/A | N/A | CATCTATGAACATGGC | 30 | Y | 1916 |
| 1242577 | 19301 | 19316 | N/A | N/A | CAAAGGGTAACATCCA | 39 | Y | 1917 |
| 1242601 | 20274 | 20289 | N/A | N/A | GACGATTTCATCCCAG | 11 | Y | 1918 |
| 1242625 | 20633 | 20648 | N/A | N/A | ACACACCTGACCAGAG | 106 | Y | 1919 |
| | 20675 | 20690 | | | | | | |
| | 20717 | 20732 | | | | | | |
| | 20759 | 20774 | | | | | | |
| | 20801 | 20816 | | | | | | |
| | 20927 | 20942 | | | | | | |
| | 21053 | 21068 | | | | | | |
| 1242649 | 20933 | 20948 | N/A | N/A | ATCAGAACACACCTGA | 89 | Y | 1920 |
| | 21059 | 21074 | | | | | | |
| 1242673 | 22468 | 22483 | N/A | N/A | GAGTATTTGCCCTTTC | 37 | Y | 1921 |
| 1242696 | 22855 | 22870 | N/A | N/A | ACATGGAAAGGGAGTG | 74 | Y | 1922 |
| 1242720 | 23468 | 23483 | N/A | N/A | GATAACTTGCATGCTT | 90 | Y | 1923 |
| 1242744 | 23774 | 23789 | N/A | N/A | CATGAATCAAAAGGCT | 84 | Y | 1924 |
| 1242768 | 24127 | 24142 | N/A | N/A | CCAGATGAAGAAGCCC | 35 | Y | 1925 |
| 1242792 | 24411 | 24426 | N/A | N/A | CCAAGGAAGTATCAGA | 68 | Y | 1926 |
| 1242816 | 24986 | 25001 | N/A | N/A | GCACATTTGTAATTGG | 46 | Y | 1927 |
| 1242840 | 25860 | 25875 | N/A | N/A | TGAGAAGGAGCTTTCA | 63 | Y | 1928 |
| 1242864 | 26325 | 26340 | N/A | N/A | CATCTTAATCTCACAC | 55 | Y | 1929 |
| 1242888 | 26705 | 26720 | N/A | N/A | ATATTATGGTTCTAGT | 72 | Y | 1930 |
| 1242912 | 27104 | 27119 | N/A | N/A | CTAACACATAGGCTAT | 63 | Y | 1931 |
| | 27122 | 27137 | | | | | | |
| 1242936 | 27500 | 27515 | N/A | N/A | CAAGCTAAGATGTCAC | 59 | Y | 1932 |
| 1242960 | 28608 | 28623 | N/A | N/A | GGATATCTTGCCATGT | 39 | Y | 1933 |
| 1242984 | 28830 | 28845 | N/A | N/A | TAGTAGAAATTGCAAC | 93 | Y | 1934 |
| 1243008 | 29144 | 29159 | N/A | N/A | TAAGTAAGACTAATAG | 107 | Y | 1935 |
| 1243032 | 29433 | 29448 | N/A | N/A | GAAGAGCATAAGAGCT | 80 | Y | 1936 |
| 1243056 | 30705 | 30720 | N/A | N/A | GTTACCCCATACTCCT | 40 | Y | 1937 |
| 1243080 | 31432 | 31447 | N/A | N/A | TAGTAACAGTGGTTTG | 74 | Y | 1938 |
| 1243104 | 32916 | 32931 | N/A | N/A | CATATAATCTGGAGGC | 94 | Y | 1939 |
| 1243128 | 33885 | 33900 | N/A | N/A | CATTATGTTGGCACAA | 72 | Y | 1940 |
| 1243152 | 34113 | 34128 | N/A | N/A | TCTAAAGCAGCTTGTT | 59 | Y | 1941 |
| 1243176 | 34383 | 34398 | N/A | N/A | GGAAGTAGTTAGAGTT | 55 | Y | 1942 |
| 1243200 | 34548 | 34563 | N/A | N/A | ATAAAGTTTCCCTTGC | 82 | Y | 1943 |
| 1243224 | 18719 | 18734 | N/A | N/A | TCTAAAGGACCATCTT | 72 | Y | 1944 |
| 1243248 | 19181 | 19196 | N/A | N/A | AAGAGTTACACTAAGG | 40 | Y | 1945 |
| 1232737 | 5138 | 5153 | 90 | 105 | ATGCCATCTTGACCCA | 64 | Z | 22 |
| 1241428 | 5130 | 5145 | 82 | 97 | TTGACCCATCAGCAAG | 59 | Z | 1946 |
| 1241452 | 5221 | 5236 | 173 | 188 | AGGTTTCCCTATGGAG | 85 | Z | 1947 |
| 1241476 | 5290 | 5305 | 242 | 257 | TAGCCAAATGCTTACC | 60 | Z | 1948 |
| 1241500 | 5744 | 5759 | 696 | 711 | ACACTAAGATACCAGG | 46 | Z | 1949 |
| 1241524 | 5874 | 5889 | 826 | 841 | TAGTCCTCTAAGTGCA | 54 | Z | 1950 |
| 1241548 | 5945 | 5960 | 897 | 912 | TGGCTAGATCCACATG | 91 | Z | 1951 |
| 1241572 | 6014 | 6029 | 966 | 981 | TGATCGCAGCGAAGAT | 80 | Z | 1952 |
| 1241596 | N/A | N/A | 1021 | 1036 | TCTGAACCCCACTTCG | 87 | Z | 1953 |
| 1241620 | 10298 | 10313 | 1098 | 1113 | ACTCCAGTAAACCCAT | 46 | Z | 1954 |
| 1241644 | 10882 | 10897 | 1185 | 1200 | CAATGCACTGGAATCT | 64 | Z | 1955 |
| 1241668 | 11006 | 11021 | 1309 | 1324 | GTCTTGCCGATGGCCA | 40 | Z | 1956 |
| 1241692 | 11259 | 11274 | 1562 | 1577 | CATGATCAGGTCCCCC | 50 | Z | 1957 |
| 1241716 | 11393 | 11408 | 1696 | 1711 | CAGTCAGTGCAGAGCG | 63 | Z | 1958 |
| 1241740 | 11625 | 11640 | 1928 | 1943 | AATCAGACTGAAGGCT | 67 | Z | 1959 |
| 1241764 | 11924 | 11939 | 2227 | 2242 | ACATCCGCCTTCTGCA | 66 | Z | 1960 |
| 1241787 | 12097 | 12112 | 2400 | 2415 | CTCGGCTGGGAAGCTT | 58 | Z | 1961 |
| 1241811 | 12196 | 12211 | 2499 | 2514 | AGGTCCTCTCCTGGTT | 83 | Z | 1962 |
| 1241834 | 12321 | 12336 | 2624 | 2639 | GAACAATTCCAGCTGG | 57 | Z | 1963 |
| 1241858 | 12418 | 12433 | 2721 | 2736 | TGTGGTCCATTCTGGT | 64 | Z | 1964 |
| 1241882 | 12532 | 12547 | 2835 | 2850 | CAAGGTGTCGGCCTTC | 66 | Z | 1965 |
| 1241906 | 12570 | 12585 | 2873 | 2888 | AGCATGAGAGGAGCTT | 85 | Z | 1966 |
| 1241930 | 16670 | 16685 | 2988 | 3003 | GAGAATTGTCACTGAG | 55 | Z | 1967 |
| 1241954 | 21141 | 21156 | 3112 | 3127 | AGGACCAAGGAGATGT | 72 | Z | 1968 |
| 1241978 | 22999 | 23014 | 3274 | 3289 | GCAAGATCCTGACAAC | 59 | Z | 1969 |
| 1242002 | 23042 | 23057 | 3317 | 3332 | CACATAGAGTCTGGTC | 61 | Z | 1970 |
| 1242026 | 23108 | 23123 | 3383 | 3398 | ACACTGTGGATTCTTG | 83 | Z | 1971 |
| 1242050 | 30996 | 31011 | 3440 | 3455 | AGCTGAACAACAGACT | 54 | Z | 1972 |
| 1242074 | 31046 | 31061 | 3490 | 3505 | CGCAGGTAAAGGTGCG | 98 | Z | 1973 |
| 1242098 | 31082 | 31097 | 3526 | 3541 | AGTAGTTTGATCCCCT | 32 | Z | 1974 |
| 1242122 | 31705 | 31720 | 3641 | 3656 | GCTCTGGCTGGAGGTC | 47 | Z | 1975 |
| 1242146 | 35479 | 35494 | 3832 | 3847 | GGCTCAAAGACGACGG | 71 | Z | 1976 |
| 1242170 | 35630 | 35645 | 3983 | 3998 | GCAAGCTCTCTTCTCC | 49 | Z | 1977 |
| 1242194 | 35754 | 35769 | 4107 | 4122 | AAGAGGAACATCCTCT | 85 | Z | 1978 |
| 1242218 | 35901 | 35916 | 4254 | 4269 | GTCAGTTAATAGAAAG | 108 | Z | 1979 |
| 1242242 | 36031 | 36046 | 4384 | 4399 | AATTTTCAACCAGCTA | 70 | Z | 1980 |
| 1242266 | 6554 | 6569 | N/A | N/A | TTATCATTCAATGGGT | 75 | Z | 1981 |
| 1242290 | 6988 | 7003 | N/A | N/A | ATCTAAAACAGTAGAG | 74 | Z | 1982 |
| 1242314 | 8511 | 8526 | N/A | N/A | TGATTATGACACTTTC | 67 | Z | 1983 |
| 1242338 | 9453 | 9468 | N/A | N/A | AGAGTTAGTCACTAGG | 58 | Z | 1984 |
| 1242362 | 10148 | 10163 | N/A | N/A | CCTAATATTTGGCATG | 63 | Z | 1985 |
| 1242386 | 10661 | 10676 | N/A | N/A | TAAGATACACAGCTGA | 90 | Z | 1986 |
| 1242410 | 12900 | 12915 | N/A | N/A | CTCCAAGTAGCTTACA | 63 | Z | 1987 |
| 1242434 | 14416 | 14431 | N/A | N/A | TCATAAGGTCTCCCTG | 94 | Z | 1988 |
| 1242458 | 14506 | 14521 | N/A | N/A | AAGGAAGGTGCTATCT | 30 | Z | 1989 |
| | 14652 | 14667 | | | | | | |
| | 14725 | 14740 | | | | | | |
| | 14798 | 14813 | | | | | | |
| | 14944 | 14959 | | | | | | |
| | 15017 | 15032 | | | | | | |
| | 15090 | 15105 | | | | | | |
| 1242482 | 14581 | 14596 | N/A | N/A | GTAAGGCAGGTGCCAT | 34 | Z | 1990 |
| | 14873 | 14888 | | | | | | |
| | 15163 | 15178 | | | | | | |
| | 15236 | 15251 | | | | | | |
| 1242506 | 14678 | 14693 | N/A | N/A | CTCCAATCAGAGTCTG | 40 | Z | 1991 |
| | 14824 | 14839 | | | | | | |
| | 14970 | 14985 | | | | | | |
| 1242530 | 15428 | 15443 | N/A | N/A | TGCAAAGTCTAGCTCT | 47 | Z | 1992 |
| 1242554 | 17716 | 17731 | N/A | N/A | GGCAAATTCTCCAACT | 95 | Z | 1993 |
| 1242578 | 19405 | 19420 | N/A | N/A | ATCTTTGAAGCCACAC | 59 | Z | 1994 |
| 1242602 | 20298 | 20313 | N/A | N/A | CAACATTGTCACCCCA | 46 | Z | 1995 |
| 1242626 | 20634 | 20649 | N/A | N/A | GACACACCTGACCAGA | 36 | Z | 1996 |
| | 20676 | 20691 | | | | | | |
| | 20718 | 20733 | | | | | | |
| | 20760 | 20775 | | | | | | |
| | 20802 | 20817 | | | | | | |
| 1242650 | 20934 | 20949 | N/A | N/A | CATCAGAACACACCTG | 66 | Z | 1997 |
| | 21060 | 21075 | | | | | | |
| 1242674 | 22475 | 22490 | N/A | N/A | ACAATCAGAGTATTTG | 65 | Z | 1998 |
| 1242697 | 22899 | 22914 | N/A | N/A | ACAAGGAAGCACCCGT | 50 | Z | 1999 |
| 1242721 | 23469 | 23484 | N/A | N/A | CGATAACTTGCATGCT | 72 | Z | 2000 |
| 1242745 | 23775 | 23790 | N/A | N/A | ACATGAATCAAAAGGC | 43 | Z | 2001 |
| 1242769 | 24141 | 24156 | N/A | N/A | CCTTAAGCTGAGAGCC | 56 | Z | 2002 |
| 1242793 | 24412 | 24427 | N/A | N/A | TCCAAGGAAGTATCAG | 78 | Z | 2003 |
| 1242817 | 25003 | 25018 | N/A | N/A | TATTACAGATGCATCA | 79 | Z | 2004 |
| 1242841 | 25884 | 25899 | N/A | N/A | TAAATGGCTCTCTCAG | 78 | Z | 2005 |
| 1242865 | 26370 | 26385 | N/A | N/A | CATGAACAGATTCCCC | 91 | Z | 2006 |
| 1242889 | 26706 | 26721 | N/A | N/A | TATATTATGGTTCTAG | 54 | Z | 2007 |
| 1242913 | 27105 | 27120 | N/A | N/A | CCTAACACATAGGCTA | 59 | Z | 2008 |
| | 27123 | 27138 | | | | | | |
| 1242937 | 27547 | 27562 | N/A | N/A | CAAGGTATGGCAGGAG | 50 | Z | 2009 |
| 1242961 | 28609 | 28624 | N/A | N/A | CGGATATCTTGCCATG | 45 | Z | 2010 |
| 1242985 | 28832 | 28847 | N/A | N/A | AGTAGTAGAAATTGCA | 49 | Z | 2011 |
| 1243009 | 29145 | 29160 | N/A | N/A | GTAAGTAAGACTAATA | 89 | Z | 2012 |
| 1243033 | 29459 | 29474 | V/A | N/A | CAAATTAAGCCCATTC | 88 | Z | 2013 |
| 1243057 | 30827 | 30842 | N/A | N/A | TCAGATATGATCTGGG | 83 | Z | 2014 |
| 1243081 | 31433 | 31448 | N/A | N/A | TTAGTAACAGTGGTTT | 63 | Z | 2015 |
| 1243105 | 32917 | 32932 | N/A | N/A | ACATATAATCTGGAGG | 87 | Z | 2016 |
| 1243129 | 33886 | 33901 | N/A | N/A | CCATTATGTTGGCACA | 59 | Z | 2017 |
| 1243153 | 34114 | 34129 | N/A | N/A | GTCTAAAGCAGCTTGT | 71 | Z | 2018 |
| 1243177 | 34384 | 34399 | N/A | N/A | GGGAAGTAGTTAGAGT | 83 | Z | 2019 |
| 1243201 | 34573 | 34588 | N/A | N/A | CGATGTAAGTTCTTCC | 44 | Z | 2020 |
| 1243225 | 22287 | 22302 | N/A | N/A | GTTGCTATGGACATAG | 46 | Z | 2021 |
| 1243249 | 31239 | 31254 | N/A | N/A | AGAAGACACCTCACTT | 87 | Z | 2022 |
| 1232737 | 5138 | 5153 | 90 | 105 | ATGCCATCTTGACCCA | 57 | AA | 22 |
| 1241429 | 5134 | 5149 | 86 | 101 | CATCTTGACCCATCAG | 41 | AA | 2023 |
| 1241453 | 5222 | 5237 | 174 | 189 | AAGGTTTCCCTATGGA | 65 | AA | 2024 |
| 1241477 | 5291 | 5306 | 243 | 258 | TTAGCCAAATGCTTAC | 43 | AA | 2025 |
| 1241501 | 5745 | 5760 | 697 | 712 | CACACTAAGATACCAG | 46 | AA | 2026 |
| 1241525 | 5875 | 5890 | 827 | 842 | ATAGTCCTCTAAGTGC | 64 | AA | 2027 |
| 1241549 | 5946 | 5961 | 898 | 913 | GTGGCTAGATCCACAT | 99 | AA | 2028 |
| 1241573 | 6015 | 6030 | 967 | 982 | TTGATCGCAGCGAAGA | 48 | AA | 2029 |
| 1241597 | N/A | N/A | 1024 | 1039 | TTATCTGAACCCCACT | 95 | AA | 2030 |
| 1241621 | 10300 | 10315 | 1100 | 1115 | GTACTCCAGTAAACCC | 30 | AA | 2031 |
| 1241645 | 10883 | 10898 | 1186 | 1201 | TCAATGCACTGGAATC | 67 | AA | 2032 |
| 1241669 | 11008 | 11023 | 1311 | 1326 | TGGTCTTGCCGATGGC | 27 | AA | 2033 |
| 1241693 | 11260 | 11275 | 1563 | 1578 | TCATGATCAGGTCCCC | 37 | AA | 2034 |
| 1241717 | 11401 | 11416 | 1704 | 1719 | CCTTCTGCCAGTCAGT | 54 | AA | 2035 |
| 1241741 | 11626 | 11641 | 1929 | 1944 | GAATCAGACTGAAGGC | 42 | AA | 2036 |
| 1241765 | 11926 | 11941 | 2229 | 2244 | ACACATCCGCCTTCTG | 64 | AA | 2037 |
| 1241788 | 12116 | 12131 | 2419 | 2434 | TCCAGAAGGACTGTCA | 40 | AA | 2038 |
| 1241812 | 12197 | 12212 | 2500 | 2515 | GAGGTCCTCTCCTGGT | 63 | AA | 2039 |
| 1241835 | 12324 | 12339 | 2627 | 2642 | GTAGAACAATTCCAGC | 42 | AA | 2040 |
| 1241859 | 12451 | 12466 | 2754 | 2769 | GATGACAGTTCTCAAT | 79 | AA | 2041 |
| 1241883 | 12533 | 12548 | 2836 | 2851 | TCAAGGTGTCGGCCTT | 59 | AA | 2042 |
| 1241907 | 12572 | 12587 | 2875 | 2890 | GCAGCATGAGAGGAGC | 81 | AA | 2043 |
| 1241931 | 16677 | 16692 | 2995 | 3010 | TCCCCCAGAGAATTGT | 80 | AA | 2044 |
| 1241955 | 21208 | 21223 | 3179 | 3194 | TCTGATTCCGAAGTCA | 59 | AA | 2045 |
| 1241979 | 23000 | 23015 | 3275 | 3290 | TGCAAGATCCTGACAA | 74 | AA | 2046 |
| 1242003 | 23044 | 23059 | 3319 | 3334 | CCCACATAGAGTCTGG | 58 | AA | 2047 |
| 1242027 | 23109 | 23124 | 3384 | 3399 | TACACTGTGGATTCTT | 77 | AA | 2048 |
| 1242051 | 30997 | 31012 | 3441 | 3456 | AAGCTGAACAACAGAC | 54 | AA | 2049 |
| 1242075 | 31048 | 31063 | 3492 | 3507 | CTCGCAGGTAAAGGTG | 81 | AA | 2050 |
| 1242099 | 31083 | 31098 | 3527 | 3542 | GAGTAGTTTGATCCCC | 34 | AA | 2051 |
| 1242123 | 31719 | 31734 | 3655 | 3670 | CTCAGCTTTCGCAGGC | 51 | AA | 2052 |
| 1242147 | 35482 | 35497 | 3835 | 3850 | GAAGGCTCAAAGACGA | 62 | AA | 2053 |
| 1242171 | 35631 | 35646 | 3984 | 3999 | GGCAAGCTCTCTTCTC | 59 | AA | 2054 |
| 1242195 | 35757 | 35772 | 4110 | 4125 | ACCAAGAGGAACATCC | 53 | AA | 2055 |
| 1242219 | 35904 | 35919 | 4257 | 4272 | ATGGTCAGTTAATAGA | 121 | AA | 2056 |
| 1242243 | 36032 | 36047 | 4385 | 4400 | GAATTTTCAACCAGCT | 51 | AA | 2057 |
| 1242267 | 6558 | 6573 | N/A | N/A | GGAGTTATCATTCAAT | 46 | AA | 2058 |
| 1242291 | 6990 | 7005 | N/A | N/A | GTATCTAAAACAGTAG | 70 | AA | 2059 |
| 1242315 | 8530 | 8545 | N/A | N/A | CAAAGTACTICTACAG | 62 | AA | 2060 |
| 1242339 | 9455 | 9470 | N/A | N/A | CAAGAGTTAGTCACTA | 60 | AA | 2061 |
| 1242363 | 10163 | 10178 | N/A | N/A | GCAATTGAAACCTGGC | 56 | AA | 2062 |
| 1242387 | 10737 | 10752 | N/A | N/A | CGGAATGGAGAAATGG | 48 | AA | 2063 |
| 1242411 | 12917 | 12932 | N/A | N/A | ACTCTTAGGCACTAGT | 73 | AA | 2064 |
| 1242435 | 14418 | 14433 | N/A | N/A | CTTCATAAGGTCTCCC | 54 | AA | 2065 |
| 1242459 | 14507 | 14522 | N/A | N/A | GAAGGAAGGTGCTATC | 26 | AA | 2066 |
| | 14653 | 14668 | | | | | | |
| | 14726 | 14741 | | | | | | |
| | 14799 | 14814 | | | | | | |
| | 14945 | 14960 | | | | | | |
| | 15018 | 15033 | | | | | | |
| | 15091 | 15106 | | | | | | |
| 1242483 | 14582 | 14597 | N/A | N/A | AGTAAGGCAGGTGCCA | 31 | AA | 2067 |
| | 14874 | 14889 | | | | | | |
| | 15164 | 15179 | | | | | | |
| | 15237 | 15252 | | | | | | |
| 1242507 | 14679 | 14694 | N/A | N/A | GCTCCAATCAGAGTCT | 56 | AA | 2068 |
| | 14825 | 14840 | | | | | | |
| | 14971 | 14986 | | | | | | |
| 1242531 | 15622 | 15637 | N/A | N/A | CTCCAACATGCAGTCA | 46 | AA | 2069 |
| 1242555 | 17747 | 17762 | N/A | N/A | GTTTTTAGGTGAGGTT | 34 | AA | 2070 |
| 1242579 | 19474 | 19489 | N/A | N/A | GCAAAGATGAAGAGTG | 26 | AA | 2071 |
| 1242603 | 20421 | 20436 | N/A | N/A | GTAAGTGAAGCGGGCG | 27 | AA | 2072 |
| 1242627 | 20635 | 20650 | N/A | N/A | GGACACACCTGACCAG | 25 | AA | 2073 |
| | 20677 | 20692 | | | | | | |
| | 20719 | 20734 | | | | | | |
| | 20761 | 20776 | | | | | | |
| | 20803 | 20818 | | | | | | |
| 1242651 | 20935 | 20950 | N/A | N/A | GCATCAGAACACACCT | 33 | AA | 2074 |
| | 21061 | 21076 | | | | | | |
| 1242675 | 22483 | 22498 | N/A | N/A | CTATAAGGACAATCAG | 63 | AA | 2075 |
| 1242698 | 22900 | 22915 | N/A | N/A | GACAAGGAAGCACCCG | 27 | AA | 2076 |
| 1242722 | 23470 | 23485 | N/A | N/A | GCGATAACTTGCATGC | 56 | AA | 2077 |
| 1242746 | 23821 | 23836 | N/A | N/A | TGATTATTAGTGGGTA | 46 | AA | 2078 |
| 1242770 | 24158 | 24173 | N/A | N/A | TAAATTGGAGGTCCCA | 46 | AA | 2079 |
| 1242794 | 24449 | 24464 | N/A | N/A | GATATGGTCACATCTG | 33 | AA | 2080 |
| 1242818 | 25004 | 25019 | N/A | N/A | ATATTACAGATGCATC | 60 | AA | 2081 |
| 1242842 | 25885 | 25900 | N/A | N/A | GTAAATGGCTCTCTCA | 62 | AA | 2082 |
| 1242866 | 26403 | 26418 | N/A | N/A | CAAGATGACATTCCAC | 63 | AA | 2083 |
| 1242890 | 26754 | 26769 | N/A | N/A | GGAAATTTATCCATGA | 70 | AA | 2084 |
| 1242914 | 27106 | 27121 | N/A | N/A | ACCTAACACATAGGCT | 50 | AA | 2085 |
| | 27124 | 27139 | | | | | | |
| 1242938 | 27549 | 27564 | N/A | N/A | TGCAAGGTATGGCAGG | 48 | AA | 2086 |
| 1242962 | 28615 | 28630 | N/A | N/A | CAAGCACGGATATCTT | 47 | AA | 2087 |
| 1242986 | 28833 | 28848 | N/A | N/A | TAGTAGTAGAAATTGC | 82 | AA | 2088 |
| 1243010 | 29148 | 29163 | N/A | N/A | ACAGTAAGTAAGACTA | 78 | AA | 2089 |
| 1243034 | 29473 | 29488 | N/A | N/A | TACTATTCTTGAGTCA | 44 | AA | 2090 |
| 1243058 | 30828 | 30843 | N/A | N/A | CTCAGATATGATCTGG | 64 | AA | 2091 |
| 1243082 | 31512 | 31527 | N/A | N/A | AACTAGCTTCAAGCAG | 90 | AA | 2092 |
| 1243106 | 32918 | 32933 | N/A | N/A | GACATATAATCTGGAG | 69 | AA | 2093 |
| 1243130 | 33887 | 33902 | N/A | N/A | TCCATTATGTTGGCAC | 57 | AA | 2094 |
| 1243154 | 34115 | 34130 | N/A | N/A | AGTCTAAAGCAGCTTG | 52 | AA | 2095 |
| 1243178 | 34385 | 34400 | N/A | N/A | TGGGAAGTAGTTAGAG | 89 | AA | 2096 |
| 1243202 | 34574 | 34589 | N/A | N/A | TCGATGTAAGTTCTTC | 37 | AA | 2097 |
| 1243226 | 10520 | 10535 | N/A | N/A | GGGACTGCAAGAGCCA | 85 | AA | 2098 |
| 1243250 | 13394 | 13409 | N/A | N/A | ACTGAACGATAAACCC | 42 | AA | 2099 |
| 1232737 | 5138 | 5153 | 90 | 105 | ATGCCATCTTGACCCA | 73 | AB | 22 |
| 1241431 | 5139 | 5154 | 91 | 106 | GATGCCATCTTGACCC | 59 | AB | 2100 |
| 1241455 | 5244 | 5259 | 196 | 211 | GTGTGTCCTGAGCCAT | 26 | AB | 2101 |
| 1241479 | 5594 | 5609 | 546 | 561 | TTAGCCAAGGCCGGGC | 76 | AB | 2102 |
| 1241503 | 5750 | 5765 | 702 | 717 | CGGTCCACACTAAGAT | 55 | AB | 2103 |
| 1241527 | 5877 | 5892 | 829 | 844 | GGATAGTCCTCTAAGT | 70 | AB | 2104 |
| 1241551 | 5962 | 5977 | 914 | 929 | GAAGTCGATCATTAGC | 42 | AB | 2105 |
| 1241575 | 6017 | 6032 | 969 | 984 | TGTTGATCGCAGCGAA | 53 | AB | 2106 |
| 1241599 | N/A | N/A | 1026 | 1041 | CATTATCTGAACCCCA | 69 | AB | 2107 |
| 1241623 | 10315 | 10330 | 1115 | 1130 | AGAGATTCTCGAAAGG | 46 | AB | 2108 |
| 1241647 | 10885 | 10900 | 1188 | 1203 | CTTCAATGCACTGGAA | 50 | AB | 2109 |
| 1241671 | 11048 | 11063 | 1351 | 1366 | AACTCCATCTTAATGG | 81 | AB | 2110 |
| 1241695 | 11262 | 11277 | 1565 | 1580 | GCTCATGATCAGGTCC | 32 | AB | 2111 |
| 1241719 | 11421 | 11436 | 1724 | 1739 | GAGAATGTCTCCCCGC | 43 | AB | 2112 |
| 1241743 | 11629 | 11644 | 1932 | 1947 | CCTGAATCAGACTGAA | 62 | AB | 2113 |
| 1241767 | 11930 | 11945 | 2233 | 2248 | GCAGACACATCCGCCT | 47 | AB | 2114 |
| 1241790 | 12134 | 12149 | 2437 | 2452 | TCGAATTTGCCATAGT | 44 | AB | 2115 |
| 1241814 | 12200 | 12215 | 2503 | 2518 | TAGGAGGTCCTCTCCT | 104 | AB | 2116 |
| 1241837 | 12326 | 12341 | 2629 | 2644 | CAGTAGAACAATTCCA | 36 | AB | 2117 |
| 1241861 | 12453 | 12468 | 2756 | 2771 | CCGATGACAGTTCTCA | 29 | AB | 2118 |
| 1241885 | 12535 | 12550 | 2838 | 2853 | TATCAAGGTGTCGGCC | 59 | AB | 2119 |
| 1241909 | N/A | N/A | 2892 | 2907 | CCAATCCATGAGAACA | 71 | AB | 2120 |
| 1241933 | 16697 | 16712 | 3015 | 3030 | ACAACACTCTCATCCC | 48 | AB | 2121 |
| 1241957 | 21238 | 21253 | 3209 | 3224 | CAACAGGTGCTTCAGT | 84 | AB | 2122 |
| 1241981 | 23002 | 23017 | 3277 | 3292 | GATGCAAGATCCTGAC | 38 | AB | 2123 |
| 1242005 | 23049 | 23064 | 3324 | 3339 | TCTCCCCCACATAGAG | 75 | AB | 2124 |
| 1242029 | 23111 | 23126 | 3386 | 3401 | GTTACACTGTGGATTC | 54 | AB | 2125 |
| 1242053 | 31005 | 31020 | 3449 | 3464 | CGAGGACAAAGCTGAA | 54 | AB | 2126 |
| 1242077 | 31053 | 31068 | 3497 | 3512 | GTTGCCTCGCAGGTAA | 51 | AB | 2127 |
| 1242101 | 31098 | 31113 | 3542 | 3557 | CAAGAGTCCCTCACAG | 50 | AB | 2128 |
| 1242125 | 31723 | 31738 | 3659 | 3674 | CAGGCTCAGCTTTCGC | 44 | AB | 2129 |
| 1242149 | 35488 | 35503 | 3841 | 3856 | TACCAAGAAGGCTCAA | 82 | AB | 2130 |
| 1242173 | 35633 | 35648 | 3986 | 4001 | TCGGCAAGCTCTCTTC | 52 | AB | 2131 |
| 1242197 | 35759 | 35774 | 4112 | 4127 | TCACCAAGAGGAACAT | 50 | AB | 2132 |
| 1242221 | 35908 | 35923 | 4261 | 4276 | TGTTATGGTCAGTTAA | 84 | AB | 2133 |
| 1242245 | 36036 | 36051 | 4389 | 4404 | TCCTGAATTTTCAACC | 58 | AB | 2134 |
| 1242269 | 6629 | 6644 | N/A | N/A | CCAGAGTAGTAAGATT | 79 | AB | 2135 |
| 1242293 | 7051 | 7066 | N/A | N/A | GTTCTTAGGATATGGA | 70 | AB | 2136 |
| 1242317 | 8533 | 8548 | N/A | N/A | TAGCAAAGTACTTCTA | 76 | AB | 2137 |
| 1242341 | 9476 | 9491 | N/A | N/A | AGAAATTCAGGTTAGG | 44 | AB | 2138 |
| 1242365 | 10181 | 10196 | N/A | N/A | ACTATTATCACAGAGG | 79 | AB | 2139 |
| 1242389 | 12605 | 12620 | N/A | N/A | CTGGAAGCCGAGTTTC | 72 | AB | 2140 |
| 1242413 | 13016 | 13031 | N/A | N/A | TAAGAAACATCCCCCC | 85 | AB | 2141 |
| 1242437 | 14476 | 14491 | N/A | N/A | TGAGCCTCCTACCGGG | 36 | AB | 2142 |
| | 14622 | 14637 | | | | | | |
| | 14768 | 14783 | | | | | | |
| | 14914 | 14929 | | | | | | |
| | 15060 | 15075 | | | | | | |
| 1242461 | 14540 | 14555 | N/A | N/A | TACCAGGGCTCCAGTC | 62 | AB | 2143 |
| | 15268 | 15283 | | | | | | |
| 1242485 | 14584 | 14599 | N/A | N/A | AGAGTAAGGCAGGTGC | 6 | AB | 2144 |
| | 14876 | 14891 | | | | | | |
| | 15166 | 15181 | | | | | | |
| | 15239 | 15254 | | | | | | |
| 1242509 | 14681 | 14696 | N/A | N/A | GGGCTCCAATCAGAGT | 107 | AB | 2145 |
| | 14827 | 14842 | | | | | | |
| | 14973 | 14988 | | | | | | |
| 1242533 | 15876 | 15891 | N/A | N/A | AGAAAATCGCAAGCCC | 67 | AB | 2146 |
| 1242557 | 17752 | 17767 | N/A | N/A | TCATAGTTTTTAGGTG | 62 | AB | 2147 |
| 1242581 | 19532 | 19547 | N/A | N/A | GTTAAATGTCCCAAAC | 96 | AB | 2148 |
| 1242605 | 20484 | 20499 | N/A | N/A | CGTAAACAGTGCCGGG | 68 | AB | 2149 |
| 1242629 | 20637 | 20652 | N/A | N/A | CAGGACACACCTGACC | 49 | AB | 2150 |
| | 20679 | 20694 | | | | | | |
| | 20721 | 20736 | | | | | | |
| | 20763 | 20778 | | | | | | |
| | 20805 | 20820 | | | | | | |
| 1242653 | 20961 | 20976 | N/A | N/A | GATCAGAGAGCTCCGG | 77 | AB | 2151 |
| 1242677 | 22486 | 22501 | N/A | N/A | CTCCTATAAGGACAAT | 64 | AB | 2152 |
| 1242700 | 23151 | 23166 | N/A | N/A | CTGGTAAGACACCCAT | 68 | AB | 2153 |
| 1242724 | 23477 | 23492 | N/A | N/A | GCACTATGCGATAACT | 40 | AB | 2154 |
| 1242748 | 23844 | 23859 | N/A | N/A | GAAAGTGGTACAGGGA | 79 | AB | 2155 |
| 1242772 | 24165 | 24180 | N/A | N/A | GCAAAGCTAAATTGGA | 51 | AB | 2156 |
| 1242796 | 24462 | 24477 | N/A | N/A | CTTCATAGAAAGAGAT | 71 | AB | 2157 |
| 1242820 | 25021 | 25036 | N/A | N/A | TAGTAACTACATAGAG | 83 | AB | 2158 |
| 1242844 | 25890 | 25905 | N/A | N/A | CTATTGTAAATGGCTC | 64 | AB | 2159 |
| 1242868 | 26405 | 26420 | N/A | N/A | AGCAAGATGACATTCC | 65 | AB | 2160 |
| 1242892 | 26767 | 26782 | N/A | N/A | CACAAATCAGCATGGA | 34 | AB | 2161 |
| 1242916 | 27111 | 27126 | N/A | N/A | GCTATACCTAACACAT | 24 | AB | 2162 |
| | 27129 | 27144 | | | | | | |
| 1242940 | 27572 | 27587 | N/A | N/A | ATCCAATATGACTCAA | 44 | AB | 2163 |
| 1242964 | 28620 | 28635 | N/A | N/A | TTTACCAAGCACGGAT | 49 | AB | 2164 |
| 1242988 | 28839 | 28854 | N/A | N/A | ACACAGTAGTAGTAGA | 72 | AB | 2165 |
| 1243012 | 29179 | 29194 | N/A | N/A | CCCAATTAAGGAAGAG | 91 | AB | 2166 |
| 1243036 | 29487 | 29502 | N/A | N/A | TAAGAGTTTTGATGTA | 52 | AB | 2167 |
| 1243060 | 31214 | 31229 | N/A | N/A | AGATTATCTTGTGGCC | 63 | AB | 2168 |
| 1243084 | 31567 | 31582 | N/A | N/A | ATCTTAGCCTGTCTTG | 88 | AB | 2169 |
| 1243108 | 33038 | 33053 | N/A | N/A | GAAGAATCAGGTTTCG | 101 | AB | 2170 |
| 1243132 | 33915 | 33930 | N/A | N/A | ATATTGGCTTGTCCTG | 43 | AB | 2171 |
| 1243156 | 34154 | 34169 | N/A | N/A | CCAGTATTGTGAGATA | 15 | AB | 2172 |
| 1243180 | 34401 | 34416 | N/A | N/A | TTAAAGGTGAGGCCCT | 80 | AB | 2173 |
| 1243204 | 34616 | 34631 | N/A | N/A | CAATTCTACACATTGC | 47 | AB | 2174 |
| 1243228 | 13396 | 13411 | N/A | N/A | GCACTGAACGATAAAC | 64 | AB | 2175 |
| 1243252 | 30624 | 30639 | N/A | N/A | ATCCCAGTGGTTATCC | 54 | AB | 2176 |
| 1232737 | 5138 | 5153 | 90 | 105 | ATGCCATCTTGACCCA | 49 | AC | 22 |
| 1241432 | 5140 | 5155 | 92 | 107 | CGATGCCATCTTGACC | 55 | AC | 2177 |
| 1241456 | 5245 | 5260 | 197 | 212 | AGTGTGTCCTGAGCCA | 23 | AC | 2178 |
| 1241480 | 5595 | 5610 | 547 | 562 | GTTAGCCAAGGCCGGG | 40 | AC | 2179 |
| 1241504 | 5752 | 5767 | 704 | 719 | TTCGGTCCACACTAAG | 46 | AC | 2180 |
| 1241528 | 5878 | 5893 | 830 | 845 | AGGATAGTCCTCTAAG | 44 | AC | 2181 |
| 1241552 | 5963 | 5978 | 915 | 930 | TGAAGTCGATCATTAG | 49 | AC | 2182 |
| 1241576 | 6018 | 6033 | 970 | 985 | CTGTTGATCGCAGCGA | 42 | AC | 2183 |
| 1241600 | N/A | N/A | 1027 | 1042 | GCATTATCTGAACCCC | 56 | AC | 2184 |
| 1241624 | 10320 | 10335 | 1120 | 1135 | CAAATAGAGATTCTCG | 75 | AC | 2185 |
| 1241648 | 10886 | 10901 | 1189 | 1204 | TCTTCAATGCACTGGA | 28 | AC | 2186 |
| 1241672 | 11058 | 11073 | 1361 | 1376 | GTCAAACAGCAACTCC | 38 | AC | 2187 |
| 1241696 | 11296 | 11311 | 1599 | 1614 | TCTTGTGGATGGGTGG | 39 | AC | 2188 |
| 1241720 | 11422 | 11437 | 1725 | 1740 | GGAGAATGTCTCCCCG | 71 | AC | 2189 |
| 1241744 | 11630 | 11645 | 1933 | 1948 | TCCTGAATCAGACTGA | 56 | AC | 2190 |
| 1241768 | 11932 | 11947 | 2235 | 2250 | AAGCAGACACATCCGC | 58 | AC | 2191 |
| 1241791 | 12137 | 12152 | 2440 | 2455 | TTTTCGAATTTGCCAT | 32 | AC | 2192 |
| 1241815 | 12201 | 12216 | 2504 | 2519 | GTAGGAGGTCCTCTCC | 64 | AC | 2193 |
| 1241838 | 12333 | 12348 | 2636 | 2651 | GTACAAACAGTAGAAC | 39 | AC | 2194 |
| 1241862 | 12455 | 12470 | 2758 | 2773 | ACCCGATGACAGTTCT | 42 | AC | 2195 |
| 1241886 | 12537 | 12552 | 2840 | 2855 | CATATCAAGGTGTCGG | 37 | AC | 2196 |
| 1241910 | N/A | N/A | 2893 | 2908 | ACCAATCCATGAGAAC | 78 | AC | 2197 |
| 1241934 | 16701 | 16716 | 3019 | 3034 | TCACACAACACTCTCA | 55 | AC | 2198 |
| 1241958 | 21241 | 21256 | 3212 | 3227 | GCACAACAGGTGCTTC | 98 | AC | 2199 |
| 1241982 | 23003 | 23018 | 3278 | 3293 | TGATGCAAGATCCTGA | 50 | AC | 2200 |
| 1242006 | 23051 | 23066 | 3326 | 3341 | ATTCTCCCCCACATAG | 57 | AC | 2201 |
| 1242030 | 23112 | 23127 | 3387 | 3402 | GGTTACACTGTGGATT | 55 | AC | 2202 |
| 1242054 | 31006 | 31021 | 3450 | 3465 | CCGAGGACAAAGCTGA | 36 | AC | 2203 |
| 1242078 | 31054 | 31069 | 3498 | 3513 | TGTTGCCTCGCAGGTA | 61 | AC | 2204 |
| 1242102 | 31101 | 31116 | 3545 | 3560 | GTGCAAGAGTCCCTCA | 51 | AC | 2205 |
| 1242126 | 31724 | 31739 | 3660 | 3675 | CCAGGCTCAGCTTTCG | 41 | AC | 2206 |
| 1242150 | 35489 | 35504 | 3842 | 3857 | CTACCAAGAAGGCTCA | 59 | AC | 2207 |
| 1242174 | 35649 | 35664 | 4002 | 4017 | GCACAGGAAGGCATCG | 62 | AC | 2208 |
| 1242198 | 35766 | 35781 | 4119 | 4134 | CATGAGGTCACCAAGA | 65 | AC | 2209 |
| 1242222 | 35909 | 35924 | 4262 | 4277 | GTGTTATGGTCAGTTA | 74 | AC | 2210 |
| 1242246 | N/A | N/A | N/A | N/A | AACCCATGAGAACAGG | 75 | AC | 2211 |
| 1242270 | 6679 | 6694 | N/A | N/A | AACTACTCATAAAGGA | 87 | AC | 2212 |
| 1242294 | 7148 | 7163 | N/A | N/A | ATCATTAGGGAAACGG | 38 | AC | 2213 |
| 1242318 | 8535 | 8550 | N/A | N/A | CTTAGCAAAGTACTTC | 41 | AC | 2214 |
| 1242342 | 9477 | 9492 | N/A | N/A | GAGAAATTCAGGTTAG | 58 | AC | 2215 |
| 1242366 | 10182 | 10197 | N/A | N/A | AACTATTATCACAGAG | 73 | AC | 2216 |
| 1242390 | 12637 | 12652 | N/A | N/A | GAAGAAGCTGGCGAGG | 91 | AC | 2217 |
| 1242414 | 13017 | 13032 | N/A | N/A | CTAAGAAACATCCCCC | 50 | AC | 2218 |
| 1242438 | 14477 | 14492 | N/A | N/A | CTGAGCCTCCTACCGG | 29 | AC | 2219 |
| | 14623 | 14638 | | | | | | |
| | 14769 | 14784 | | | | | | |
| | 14915 | 14930 | | | | | | |
| | 15061 | 15076 | | | | | | |
| 1242462 | 14541 | 14556 | N/A | N/A | CTACCAGGGCTCCAGT | 39 | AC | 2220 |
| | 15269 | 15284 | | | | | | |
| 1242486 | 14586 | 14601 | N/A | N/A | TCAGAGTAAGGCAGGT | 12 | AC | 2221 |
| | 14878 | 14893 | | | | | | |
| | 15168 | 15183 | | | | | | |
| | 15241 | 15256 | | | | | | |
| 1242510 | 14682 | 14697 | N/A | N/A | AGGGCTCCAATCAGAG | 87 | AC | 2222 |
| | 14828 | 14843 | | | | | | |
| | 14974 | 14989 | | | | | | |
| 1242534 | 16784 | 16799 | N/A | N/A | CATATGAACTTGCACT | 69 | AC | 2223 |
| 1242558 | 17987 | 18002 | N/A | N/A | CCATACAAAGCATTCT | 27 | AC | 2224 |
| 1242582 | 19537 | 19552 | N/A | N/A | ATAAGGTTAAATGTCC | 76 | AC | 2225 |
| 1242606 | 20552 | 20567 | N/A | N/A | ACATTGGGAGGTCAGC | 81 | AC | 2226 |
| 1242630 | 20638 | 20653 | N/A | N/A | TCAGGACACACCTGAC | 47 | AC | 2227 |
| | 20680 | 20695 | | | | | | |
| | 20722 | 20737 | | | | | | |
| | 20764 | 20779 | | | | | | |
| | 20806 | 20821 | | | | | | |
| | 20848 | 20863 | | | | | | |
| 1242654 | 21551 | 21566 | N/A | N/A | AAGCAATGCATTACAC | 52 | AC | 2228 |
| 1242678 | 22496 | 22511 | N/A | N/A | TTCTAGACACCTCCTA | 59 | AC | 2229 |
| 1242701 | 23209 | 23224 | N/A | N/A | CAAAGTAACCCCCATC | 66 | AC | 2230 |
| 1242725 | 23543 | 23558 | N/A | N/A | TGTAAGAGTCCTCTCC | 48 | AC | 2231 |
| 1242749 | 23849 | 23864 | N/A | N/A | TACAGGAAAGTGGTAC | 72 | AC | 2232 |
| 1242773 | 24166 | 24181 | N/A | N/A | AGCAAAGCTAAATTGG | 56 | AC | 2233 |
| 1242797 | 24490 | 24505 | N/A | N/A | GCGAGGAAATGAAGGC | 42 | AC | 2234 |
| 1242821 | 25026 | 25041 | N/A | N/A | GACAATAGTAACTACA | 36 | AC | 2235 |
| 1242845 | 25892 | 25907 | N/A | N/A | GACTATTGTAAATGGC | 48 | AC | 2236 |
| 1242869 | 26406 | 26421 | N/A | N/A | CAGCAAGATGACATTC | 63 | AC | 2237 |
| 1242893 | 26770 | 26785 | N/A | N/A | CTACACAAATCAGCAT | 61 | AC | 2238 |
| 1242917 | 27130 | 27145 | N/A | N/A | AGCTATACCTAACACA | 71 | AC | 2239 |
| 1242941 | 27613 | 27628 | N/A | N/A | TCATAGCAAGTCCCCA | 80 | AC | 2240 |
| 1242965 | 28622 | 28637 | N/A | N/A | CATTTACCAAGCACGG | 25 | AC | 2241 |
| 1242989 | 28876 | 28891 | N/A | N/A | GTAGAATGGATTATTC | 54 | AC | 2242 |
| 1243013 | 29206 | 29221 | N/A | N/A | GATTATCCATCCACTG | 37 | AC | 2243 |
| 1243037 | 29504 | 29519 | N/A | N/A | ATCAATCTCGATGGAA | 41 | AC | 2244 |
| 1243061 | 31215 | 31230 | N/A | N/A | CAGATTATCTTGTGGC | 52 | AC | 2245 |
| 1243085 | 31576 | 31591 | N/A | N/A | GATTTTAGCATCTTAG | 53 | AC | 2246 |
| 1243109 | 33090 | 33105 | N/A | N/A | GAAATGTTTTGGCCCG | 79 | AC | 2247 |
| 1243133 | 33916 | 33931 | N/A | N/A | AATATTGGCTTGTCCT | 81 | AC | 2248 |
| 1243157 | 34194 | 34209 | N/A | N/A | ACCAAATTCATCAGAG | 57 | AC | 2249 |
| 1243181 | 34402 | 34417 | N/A | N/A | CTTAAAGGTGAGGCCC | 58 | AC | 2250 |
| 1243205 | 34619 | 34634 | N/A | N/A | GATCAATTCTACACAT | 95 | AC | 2251 |
| 1243229 | 24164 | 24179 | N/A | N/A | CAAAGCTAAATTGGAG | 64 | AC | 2252 |
| 1243253 | 13588 | 13603 | N/A | N/A | TAGGAAGGTGGTCCTG | 75 | AC | 2253 |
| 1232737 | 5138 | 5153 | 90 | 105 | ATGCCATCTTGACCCA | 58 | AD | 22 |
| 1241433 | 5141 | 5156 | 93 | 108 | ACGATGCCATCTTGAC | 39 | AD | 2254 |
| 1241457 | 5247 | 5262 | 199 | 214 | GGAGTGTGTCCTGAGC | 53 | AD | 2255 |
| 1241481 | 5625 | 5640 | 577 | 592 | GTAACAAGTCAAAATC | 67 | AD | 2256 |
| 1241505 | 5754 | 5769 | 706 | 721 | GCTTCGGTCCACACTA | 53 | AD | 2257 |
| 1241529 | 5879 | 5894 | 831 | 846 | GAGGATAGTCCTCTAA | 95 | AD | 2258 |
| 1241553 | 5968 | 5983 | 920 | 935 | CCCATTGAAGTCGATC | 51 | AD | 2259 |
| 1241577 | 6019 | 6034 | 971 | 986 | CCTGTTGATCGCAGCG | 39 | AD | 2260 |
| 1241601 | N/A | N/A | 1028 | 1043 | TGCATTATCTGAACCC | 49 | AD | 2261 |
| 1241625 | N/A | N/A | 1141 | 1156 | CGGTAATCTTTCTTCA | 40 | AD | 2262 |
| 1241649 | 10887 | 10902 | 1190 | 1205 | GTCTTCAATGCACTGG | 35 | AD | 2263 |
| 1241673 | 11059 | 11074 | 1362 | 1377 | GGTCAAACAGCAACTC | 40 | AD | 2264 |
| 1241697 | 11297 | 11312 | 1600 | 1615 | ATCTTGTGGATGGGTG | 48 | AD | 2265 |
| 1241721 | 11423 | 11438 | 1726 | 1741 | AGGAGAATGTCTCCCC | 64 | AD | 2266 |
| 1241745 | 11727 | 11742 | 2030 | 2045 | GGCAAGGCTCTTGCCA | 95 | AD | 2267 |
| 1241769 | 11933 | 11948 | 2236 | 2251 | AAAGCAGACACATCCG | 57 | AD | 2268 |
| 1241792 | 12142 | 12157 | 2445 | 2460 | ACCCCTTTTCGAATTT | 38 | AD | 2269 |
| 1241816 | 12202 | 12217 | 2505 | 2520 | AGTAGGAGGTCCTCTC | 47 | AD | 2270 |
| 1241839 | 12359 | 12374 | 2662 | 2677 | TGCACGAAGTCCTCCT | 39 | AD | 2271 |
| 1241863 | 12463 | 12478 | 2766 | 2781 | GTGACTCCACCCGATG | 56 | AD | 2272 |
| 1241887 | 12538 | 12553 | 2841 | 2856 | CCATATCAAGGTGTCG | 36 | AD | 2273 |
| 1241911 | N/A | N/A | 2894 | 2909 | CACCAATCCATGAGAA | 39 | AD | 2274 |
| 1241935 | 16730 | 16745 | 3048 | 3063 | GAATGTTACAGCCAGG | 33 | AD | 2275 |
| 1241959 | 21246 | 21261 | 3217 | 3232 | AGATTGCACAACAGGT | 43 | AD | 2276 |
| 1241983 | 23004 | 23019 | 3279 | 3294 | CTGATGCAAGATCCTG | 26 | AD | 2277 |
| 1242007 | 23052 | 23067 | 3327 | 3342 | CATTCTCCCCCACATA | 55 | AD | 2278 |
| 1242031 | 23113 | 23128 | 3388 | 3403 | AGGTTACACTGTGGAT | 57 | AD | 2279 |
| 1242055 | 31007 | 31022 | 3451 | 3466 | ACCGAGGACAAAGCTG | 33 | AD | 2280 |
| 1242079 | 31055 | 31070 | 3499 | 3514 | GTGTTGCCTCGCAGGT | 26 | AD | 2281 |
| 1242103 | 31102 | 31117 | 3546 | 3561 | GGTGCAAGAGTCCCTC | 37 | AD | 2282 |
| 1242127 | 31736 | 31751 | 3672 | 3687 | GGTCATTGTTGCCCAG | 57 | AD | 2283 |
| 1242151 | 35490 | 35505 | 3843 | 3858 | CCTACCAAGAAGGCTC | 53 | AD | 2284 |
| 1242175 | 35650 | 35665 | 4003 | 4018 | TGCACAGGAAGGCATC | 76 | AD | 2285 |
| 1242199 | 35771 | 35786 | 4124 | 4139 | AATTACATGAGGTCAC | 53 | AD | 2286 |
| 1242223 | 35910 | 35925 | 4263 | 4278 | TGTGTTATGGTCAGTT | 73 | AD | 2287 |
| 1242247 | N/A | N/A | N/A | N/A | CCCAACCCATGAGAAC | 98 | AD | 2288 |
| 1242271 | 6717 | 6732 | N/A | N/A | CATAGTTGAACCCGGA | 35 | AD | 2289 |
| 1242295 | 7395 | 7410 | N/A | N/A | CATACTAACTTCTGTG | 75 | AD | 2290 |
| 1242319 | 8566 | 8581 | N/A | N/A | CTTGAATGTGCCATAA | 57 | AD | 2291 |
| 1242343 | 9483 | 9498 | N/A | N/A | CTATAGGAGAAATTCA | 89 | AD | 2292 |
| 1242367 | 10183 | 10198 | N/A | N/A | GAACTATTATCACAGA | 90 | AD | 2293 |
| 1242391 | 12639 | 12654 | N/A | N/A | AAGAAGAAGCTGGCGA | 81 | AD | 2294 |
| 1242415 | 13018 | 13033 | N/A | N/A | TCTAAGAAACATCCCC | 59 | AD | 2295 |
| 1242439 | 14478 | 14493 | N/A | N/A | GCTGAGCCTCCTACCG | 24 | AD | 2296 |
| | 14624 | 14639 | | | | | | |
| | 14770 | 14785 | | | | | | |
| | 14916 | 14931 | | | | | | |
| | 15062 | 15077 | | | | | | |
| 1242463 | 14542 | 14557 | N/A | N/A | CCTACCAGGGCTCCAG | 29 | AD | 2297 |
| | 15270 | 15285 | | | | | | |
| 1242487 | 14587 | 14602 | N/A | N/A | CTCAGAGTAAGGCAGG | 14 | AD | 2298 |
| | 14879 | 14894 | | | | | | |
| | 15169 | 15184 | | | | | | |
| | 15242 | 15257 | | | | | | |
| 1242511 | 14683 | 14698 | N/A | N/A | CAGGGCTCCAATCAGA | 70 | AD | 2299 |
| | 14829 | 14844 | | | | | | |
| | 14975 | 14990 | | | | | | |
| 1242535 | 16786 | 16801 | N/A | N/A | CTCATATGAACTTGCA | 30 | AD | 2300 |
| 1242559 | 17999 | 18014 | N/A | N/A | TGACATTTCAACCCAT | 74 | AD | 2301 |
| 1242583 | 19595 | 19610 | N/A | N/A | CCAGAATCATACAGGG | 53 | AD | 2302 |
| 1242607 | 20561 | 20576 | N/A | N/A | GCACAAGGCACATTGG | 59 | AD | 2303 |
| 1242631 | 20641 | 20656 | N/A | N/A | GCATCAGGACACACCT | 22 | AD | 2304 |
| | 20683 | 20698 | | | | | | |
| | 20725 | 20740 | | | | | | |
| | 20767 | 20782 | | | | | | |
| | 20809 | 20824 | | | | | | |
| | 20851 | 20866 | | | | | | |
| | 21019 | 21034 | | | | | | |
| 1242655 | 21597 | 21612 | N/A | N/A | CAATATGAGGACCCAG | 31 | AD | 2305 |
| 1242679 | 22576 | 22591 | N/A | N/A | ACCATTAAACAATGTC | 53 | AD | 2306 |
| 1242702 | 23214 | 23229 | N/A | N/A | CTGACCAAAGTAACCC | 95 | AD | 2307 |
| 1242726 | 23545 | 23560 | N/A | N/A | AGTGTAAGAGTCCTCT | 31 | AD | 2308 |
| 1242750 | 23851 | 23866 | N/A | N/A | GATACAGGAAAGTGGT | 59 | AD | 2309 |
| 1242774 | 24172 | 24187 | N/A | N/A | AGGTTTAGCAAAGCTA | 40 | AD | 2310 |
| 1242798 | 24503 | 24518 | N/A | N/A | GTAATACCCTAAGGCG | 47 | AD | 2311 |
| 1242822 | 25033 | 25048 | N/A | N/A | AGGTATTGACAATAGT | 17 | AD | 2312 |
| 1242846 | 25943 | 25958 | N/A | N/A | GATTATATAACAATCT | 107 | AD | 2313 |
| 1242870 | 26417 | 26432 | N/A | N/A | GCAAAATGTGTCAGCA | 68 | AD | 2314 |
| 1242894 | 26794 | 26809 | N/A | N/A | GATATTATGCCCCAAT | 35 | AD | 2315 |
| 1242918 | 27137 | 27152 | N/A | N/A | AAAATGTAGCTATACC | 89 | AD | 2316 |
| 1242942 | 27614 | 27629 | N/A | N/A | ATCATAGCAAGTCCCC | 59 | AD | 2317 |
| 1242966 | 28625 | 28640 | N/A | N/A | CTACATTTACCAAGCA | 42 | AD | 2318 |
| 1242990 | 28878 | 28893 | N/A | N/A | GAGTAGAATGGATTAT | 70 | AD | 2319 |
| 1243014 | 29209 | 29224 | N/A | N/A | AGTGATTATCCATCCA | 34 | AD | 2320 |
| 1243038 | 29505 | 29520 | N/A | N/A | CATCAATCTCGATGGA | 62 | AD | 2321 |
| 1243062 | 31216 | 31231 | N/A | N/A | ACAGATTATCTTGTGG | 71 | AD | 2322 |
| 1243086 | 31580 | 31595 | N/A | N/A | CCAAGATTTTAGCATC | 63 | AD | 2323 |
| 1243110 | 33139 | 33154 | N/A | N/A | ACACATTGGACATGAT | 73 | AD | 2324 |
| 1243134 | 33918 | 33933 | N/A | N/A | GGAATATTGGCTTGTC | 37 | AD | 2325 |
| 1243158 | 34214 | 34229 | N/A | N/A | GAAGAGGACTCTCGCC | 71 | AD | 2326 |
| 1243182 | 34404 | 34419 | N/A | N/A | TACTTAAAGGTGAGGC | 76 | AD | 2327 |
| 1243206 | 34629 | 34644 | N/A | N/A | TCACTAACCTGATCAA | 108 | AD | 2328 |
| 1243230 | 27223 | 27238 | N/A | N/A | GCTCAGCATGTGTGAC | 68 | AD | 2329 |
| 1243254 | 9548 | 9563 | N/A | N/A | CATGCATCTGTGTTGA | 85 | AD | 2330 |
| 871399 | 22659 | 22674 | N/A | N/A | CCTTAAGCACTTCACA | 58 | AE | 2331 |
| 1232737 | 5138 | 5153 | 90 | 105 | ATGCCATCTTGACCCA | 48 | AE | 22 |
| 1241434 | 5143 | 5158 | 95 | 110 | TCACGATGCCATCTTG | 34 | AE | 2332 |
| 1241458 | 5248 | 5263 | 200 | 215 | AGGAGTGTGTCCTGAG | 46 | AE | 2333 |
| 1241482 | 5629 | 5644 | 581 | 596 | GACTGTAACAAGTCAA | 81 | AE | 2334 |
| 1241506 | 5759 | 5774 | 711 | 726 | CTTAGGCTTCGGTCCA | 45 | AE | 2335 |
| 1241530 | 5880 | 5895 | 832 | 847 | GGAGGATAGTCCTCTA | 90 | AE | 2336 |
| 1241554 | 5970 | 5985 | 922 | 937 | TCCCCATTGAAGTCGA | 74 | AE | 2337 |
| 1241578 | 6020 | 6035 | 972 | 987 | TCCTGTTGATCGCAGC | 27 | AE | 2338 |
| 1241602 | 10229 | 10244 | 1029 | 1044 | GTGCATTATCTGAACC | 53 | AE | 2339 |
| 1241626 | N/A | N/A | 1142 | 1157 | ACGGTAATCTTTCTTC | 32 | AE | 2340 |
| 1241650 | 10888 | 10903 | 1191 | 1206 | TGTCTTCAATGCACTG | 45 | AE | 2341 |
| 1241674 | 11080 | 11095 | 1383 | 1398 | GCTCAGAATGCTCATC | 30 | AE | 2342 |
| 1241698 | 11299 | 11314 | 1602 | 1617 | CGATCTTGTGGATGGG | 27 | AE | 2343 |
| 1241722 | 11424 | 11439 | 1727 | 1742 | CAGGAGAATGTCTCCC | 61 | AE | 2344 |
| 1241746 | 11728 | 11743 | 2031 | 2046 | GGGCAAGGCTCTTGCC | 102 | AE | 2345 |
| 1241770 | 11946 | 11961 | 2249 | 2264 | GTTCATCCTCAGGAAA | 81 | AE | 2346 |
| 1241793 | 12144 | 12159 | 2447 | 2462 | ATACCCCTTTTCGAAT | 63 | AE | 2347 |
| 1241817 | 12205 | 12220 | 2508 | 2523 | CCAAGTAGGAGGTCCT | 34 | AE | 2348 |
| 1241840 | 12360 | 12375 | 2663 | 2678 | TTGCACGAAGTCCTCC | 35 | AE | 2349 |
| 1241864 | 12465 | 12480 | 2768 | 2783 | CAGTGACTCCACCCGA | 25 | AE | 2350 |
| 1241888 | 12539 | 12554 | 2842 | 2857 | ACCATATCAAGGTGTC | 81 | AE | 2351 |
| 1241912 | N/A | N/A | 2897 | 2912 | GTTCACCAATCCATGA | 75 | AE | 2352 |
| 1241936 | 16731 | 16746 | 3049 | 3064 | CGAATGTTACAGCCAG | 46 | AE | 2353 |
| 1241960 | 21248 | 21263 | 3219 | 3234 | TCAGATTGCACAACAG | 32 | AE | 2354 |
| 1241984 | 23005 | 23020 | 3280 | 3295 | ACTGATGCAAGATCCT | 18 | AE | 2355 |
| 1242008 | 23053 | 23068 | 3328 | 3343 | GCATTCTCCCCCACAT | 40 | AE | 2356 |
| 1242032 | 23114 | 23129 | 3389 | 3404 | CAGGTTACACTGTGGA | 41 | AE | 2357 |
| 1242056 | 31012 | 31027 | 3456 | 3471 | TGAGTACCGAGGACAA | 40 | AE | 2358 |
| 1242080 | 31056 | 31071 | 3500 | 3515 | AGTGTTGCCTCGCAGG | 32 | AE | 2359 |
| 1242104 | 31122 | 31137 | 3566 | 3581 | CACCTGAAGCTTGCAG | 17 | AE | 2360 |
| 1242128 | 31737 | 31752 | 3673 | 3688 | AGGTCATTGTTGCCCA | 65 | AE | 2361 |
| 1242152 | 35491 | 35506 | 3844 | 3859 | TCCTACCAAGAAGGCT | 74 | AE | 2362 |
| 1242176 | 35662 | 35677 | 4015 | 4030 | ATGCCCAAGCTCTGCA | 82 | AE | 2363 |
| 1242200 | 35773 | 35788 | 4126 | 4141 | CTAATTACATGAGGTC | 15 | AE | 2364 |
| 1242224 | 35911 | 35926 | 4264 | 4279 | CTGTGTTATGGTCAGT | 78 | AE | 2365 |
| 1242248 | N/A | N/A | N/A | N/A | CCCCAACCCATGAGAA | 88 | AE | 2366 |
| 1242272 | 6719 | 6734 | N/A | N/A | AACATAGTTGAACCCG | 51 | AE | 2367 |
| 1242296 | 7397 | 7412 | N/A | N/A | ATCATACTAACTTCTG | 58 | AE | 2368 |
| 1242320 | 8592 | 8607 | N/A | N/A | AATACCAGAAGCTGTT | 52 | AE | 2369 |
| 1242344 | 9497 | 9512 | N/A | N/A | CTTAAGAAGGCATTCT | 72 | AE | 2370 |
| 1242368 | 10227 | 10242 | N/A | N/A | GCATTATCTGAACCTA | 68 | AE | 2371 |
| 1242392 | 12683 | 12698 | N/A | N/A | GTATTTGGAAGATAGT | 73 | AE | 2372 |
| 1242416 | 13043 | 13058 | N/A | N/A | TTAAAGGAGGCTTAGA | 75 | AE | 2373 |
| 1242440 | 14479 | 14494 | N/A | N/A | TGCTGAGCCTCCTACC | 30 | AE | 2374 |
| | 14625 | 14640 | | | | | | |
| | 14771 | 14786 | | | | | | |
| | 14917 | 14932 | | | | | | |
| | 15063 | 15078 | | | | | | |
| 1242464 | 14544 | 14559 | N/A | N/A | CCCCTACCAGGGCTCC | 50 | AE | 2375 |
| | 15199 | 15214 | | | | | | |
| | 15272 | 15287 | | | | | | |
| 1242488 | 14588 | 14603 | N/A | N/A | CCTCAGAGTAAGGCAG | 23 | AE | 2376 |
| | 14880 | 14895 | | | | | | |
| | 15170 | 15185 | | | | | | |
| | 15243 | 15258 | | | | | | |
| | 15316 | 15331 | | | | | | |
| 1242512 | 14685 | 14700 | N/A | N/A | GCCAGGGCTCCAATCA | 68 | AE | 2377 |
| | 14831 | 14846 | | | | | | |
| | 14977 | 14992 | | | | | | |
| 1242536 | 17258 | 17273 | N/A | N/A | GATCTTAGACTTTCGG | 55 | AE | 2378 |
| 1242560 | 18351 | 18366 | N/A | N/A | GACTTTAACACTTGCT | 19 | AE | 2379 |
| 1242584 | 19596 | 19611 | N/A | N/A | TCCAGAATCATACAGG | 37 | AE | 2380 |
| 1242608 | 20567 | 20582 | N/A | N/A | AATACAGCACAAGGCA | 64 | AE | 2381 |
| 1242632 | 20642 | 20657 | N/A | N/A | AGCATCAGGACACACC | 11 | AE | 2382 |
| | 20684 | 20699 | | | | | | |
| | 20726 | 20741 | | | | | | |
| | 20810 | 20825 | | | | | | |
| | 20852 | 20867 | | | | | | |
| | 21020 | 21035 | | | | | | |
| 1242656 | 21598 | 21613 | N/A | N/A | ACAATATGAGGACCCA | 19 | AE | 2383 |
| 1242703 | 23247 | 23262 | N/A | N/A | GTTTTTACCTCCTTAC | 53 | AE | 2384 |
| 1242727 | 23546 | 23561 | N/A | N/A | CAGTGTAAGAGTCCTC | 22 | AE | 2385 |
| 1242751 | 23859 | 23874 | N/A | N/A | GGGAAAGTGATACAGG | 71 | AE | 2386 |
| 1242775 | 24180 | 24195 | N/A | N/A | GTAAGATGAGGTTTAG | 42 | AE | 2387 |
| 1242799 | 24505 | 24520 | N/A | N/A | GGGTAATACCCTAAGG | 89 | AE | 2388 |
| 1242823 | 25074 | 25089 | N/A | N/A | GCTCTGTTTGTGATAC | 23 | AE | 2389 |
| | 26262 | 26277 | | | | | | |
| 1242847 | 25944 | 25959 | N/A | N/A | GGATTATATAACAATC | 74 | AE | 2390 |
| 1242871 | 26418 | 26433 | N/A | N/A | GGCAAAATGTGTCAGC | 31 | AE | 2391 |
| 1242895 | 26795 | 26810 | N/A | N/A | GGATATTATGCCCCAA | 24 | AE | 2392 |
| 1242919 | 27155 | 27170 | N/A | N/A | CCCAAAGTTCGAGAGA | 65 | AE | 2393 |
| 1242943 | 27651 | 27666 | N/A | N/A | CTGTAGATGAACCCAG | 73 | AE | 2394 |
| 1242967 | 28637 | 28652 | N/A | N/A | CCTAACTGAGCTCTAC | 57 | AE | 2395 |
| 1242991 | 28913 | 28928 | N/A | N/A | AAAGTTATGCAGGCTT | 40 | AE | 2396 |
| 1243015 | 29214 | 29229 | N/A | N/A | GAAAAAGTGATTATCC | 98 | AE | 2397 |
| 1243039 | 29526 | 29541 | N/A | N/A | GAGCATAAAACCCCAA | 37 | AE | 2398 |
| 1243063 | 31219 | 31234 | N/A | N/A | GATACAGATTATCTTG | 51 | AE | 2399 |
| 1243087 | 31581 | 31596 | N/A | N/A | CCCAAGATTTTAGCAT | 87 | AE | 2400 |
| 1243111 | 33267 | 33282 | N/A | N/A | TCAGAATGCCACCATG | 92 | AE | 2401 |
| 1243135 | 33919 | 33934 | N/A | N/A | GGGAATATTGGCTTGT | 29 | AE | 2402 |
| 1243159 | 34218 | 34233 | N/A | N/A | TCAGGAAGAGGACTCT | 53 | AE | 2403 |
| 1243183 | 34405 | 34420 | N/A | N/A | GTACTTAAAGGTGAGG | 45 | AE | 2404 |
| 1243207 | 34636 | 34651 | N/A | N/A | CATTTAGTCACTAACC | 67 | AE | 2405 |
| 1243231 | 34205 | 34220 | N/A | N/A | TCTCGCCAGCAACCAA | 52 | AE | 2406 |
| 1243255 | 24313 | 24328 | N/A | N/A | GAATGCTGATCTGGCT | 47 | AE | 2407 |
| 1232737 | 5138 | 5153 | 90 | 105 | ATGCCATCTTGACCCA | 57 | AF | 22 |
| 1241430 | 5137 | 5152 | 89 | 104 | TGCCATCTTGACCCAT | 37 | AF | 2408 |
| 1241454 | 5223 | 5238 | 175 | 190 | AAAGGTTTCCCTATGG | 76 | AF | 2409 |
| 1241478 | 5292 | 5307 | 244 | 259 | GTTAGCCAAATGCTTA | 40 | AF | 2410 |
| 1241502 | 5747 | 5762 | 699 | 714 | TCCACACTAAGATACC | 77 | AF | 2411 |
| 1241526 | 5876 | 5891 | 828 | 843 | GATAGTCCTCTAAGTG | 95 | AF | 2412 |
| 1241550 | 5947 | 5962 | 899 | 914 | CGTGGCTAGATCCACA | 89 | AF | 2413 |
| 1241574 | 6016 | 6031 | 968 | 983 | GTTGATCGCAGCGAAG | 40 | AF | 2414 |
| 1241598 | N/A | N/A | 1025 | 1040 | ATTATCTGAACCCCAC | 84 | AF | 2415 |
| 1241622 | 10314 | 10329 | 1114 | 1129 | GAGATTCTCGAAAGGT | 50 | AF | 2416 |
| 1241646 | 10884 | 10899 | 1187 | 1202 | TTCAATGCACTGGAAT | 47 | AF | 2417 |
| 1241670 | 11012 | 11027 | 1315 | 1330 | GTCTTGGTCTTGCCGA | 37 | AF | 2418 |
| 1241694 | 11261 | 11276 | 1564 | 1579 | CTCATGATCAGGTCCC | 25 | AF | 2419 |
| 1241718 | 11413 | 11428 | 1716 | 1731 | CTCCCCGCTCGGCCTT | 59 | AF | 2420 |
| 1241742 | 11627 | 11642 | 1930 | 1945 | TGAATCAGACTGAAGG | 50 | AF | 2421 |
| 1241766 | 11928 | 11943 | 2231 | 2246 | AGACACATCCGCCTTC | 56 | AF | 2422 |
| 1241789 | 12133 | 12148 | 2436 | 2451 | CGAATTTGCCATAGTT | 26 | AF | 2423 |
| 1241813 | 12198 | 12213 | 2501 | 2516 | GGAGGTCCTCTCCTGG | 73 | AF | 2424 |
| 1241836 | 12325 | 12340 | 2628 | 2643 | AGTAGAACAATTCCAG | 27 | AF | 2425 |
| 1241860 | 12452 | 12467 | 2755 | 2770 | CGATGACAGTTCTCAA | 47 | AF | 2426 |
| 1241884 | 12534 | 12549 | 2837 | 2852 | ATCAAGGTGTCGGCCT | 36 | AF | 2427 |
| 1241908 | N/A | N/A | 2889 | 2904 | ATCCATGAGAACAGGC | 33 | AF | 2428 |
| 1241932 | 16696 | 16711 | 3014 | 3029 | CAACACTCTCATCCCT | 66 | AF | 2429 |
| 1241956 | 21214 | 21229 | 3185 | 3200 | CAGAAGTCTGATTCCG | 46 | AF | 2430 |
| 1241980 | 23001 | 23016 | 3276 | 3291 | ATGCAAGATCCTGACA | 66 | AF | 2431 |
| 1242004 | 23045 | 23060 | 3320 | 3335 | CCCCACATAGAGTCTG | 51 | AF | 2432 |
| 1242028 | 23110 | 23125 | 3385 | 3400 | TTACACTGTGGATTCT | 64 | AF | 2433 |
| 1242052 | 31001 | 31016 | 3445 | 3460 | GACAAAGCTGAACAAC | 54 | AF | 2434 |
| 1242076 | 31049 | 31064 | 3493 | 3508 | CCTCGCAGGTAAAGGT | 77 | AF | 2435 |
| 1242100 | 31097 | 31112 | 3541 | 3556 | AAGAGTCCCTCACAGA | 38 | AF | 2436 |
| 1242124 | 31720 | 31735 | 3656 | 3671 | GCTCAGCTTTCGCAGG | 59 | AF | 2437 |
| 1242148 | 35486 | 35501 | 3839 | 3854 | CCAAGAAGGCTCAAAG | 83 | AF | 2438 |
| 1242172 | 35632 | 35647 | 3985 | 4000 | CGGCAAGCTCTCTTCT | 52 | AF | 2439 |
| 1242196 | 35758 | 35773 | 4111 | 4126 | CACCAAGAGGAACATC | 47 | AF | 2440 |
| 1242220 | 35907 | 35922 | 4260 | 4275 | GTTATGGTCAGTTAAT | 81 | AF | 2441 |
| 1242244 | 36033 | 36048 | 4386 | 4401 | TGAATTTTCAACCAGC | 23 | AF | 2442 |
| 1242268 | 6624 | 6639 | N/A | N/A | GTAGTAAGATTCACAG | 47 | AF | 2443 |
| 1242292 | 7007 | 7022 | N/A | N/A | GGGAAATGGTGCAGAT | 67 | AF | 2444 |
| 1242316 | 8531 | 8546 | N/A | N/A | GCAAAGTACTTCTACA | 64 | AF | 2445 |
| 1242340 | 9475 | 9490 | N/A | N/A | GAAATTCAGGTTAGGT | 64 | AF | 2446 |
| 1242364 | 10164 | 10179 | N/A | N/A | TGCAATTGAAACCTGG | 67 | AF | 2447 |
| 1242388 | 10838 | 10853 | N/A | N/A | CGGTAATCTACGGCAA | 81 | AF | 2448 |
| 1242412 | 12929 | 12944 | N/A | N/A | AGACATTGACTGACTC | 28 | AF | 2449 |
| 1242436 | 14462 | 14477 | N/A | N/A | GGGCTTCAGTGAGAGT | 46 | AF | 2450 |
| | 14608 | 14623 | | | | | | |
| | 14754 | 14769 | | | | | | |
| | 14900 | 14915 | | | | | | |
| | 15046 | 15061 | | | | | | |
| 1242460 | 14508 | 14523 | N/A | N/A | GGAAGGAAGGTGCTAT | 18 | AF | 2451 |
| | 14654 | 14669 | | | | | | |
| | 14727 | 14742 | | | | | | |
| | 14800 | 14815 | | | | | | |
| | 14946 | 14961 | | | | | | |
| | 15019 | 15034 | | | | | | |
| | 15092 | 15107 | | | | | | |
| 1242484 | 14583 | 14598 | N/A | N/A | GAGTAAGGCAGGTGCC | 12 | AF | 2452 |
| | 14875 | 14890 | | | | | | |
| | 15165 | 15180 | | | | | | |
| | 15238 | 15253 | | | | | | |
| 1242508 | 14680 | 14695 | N/A | N/A | GGCTCCAATCAGAGTC | 81 | AF | 2453 |
| | 14826 | 14841 | | | | | | |
| | 14972 | 14987 | | | | | | |
| 1242532 | 15660 | 15675 | N/A | N/A | GCTATATGGATCTTTT | 47 | AF | 2454 |
| 1242556 | 17751 | 17766 | N/A | N/A | CATAGTTTTTAGGTGA | 30 | AF | 2455 |
| 1242580 | 19520 | 19535 | N/A | N/A | AAACAACCAGTCTCCA | 71 | AF | 2456 |
| 1242604 | 20444 | 20459 | N/A | N/A | TGTGAATGGTGCGCTC | 55 | AF | 2457 |
| 1242628 | 20636 | 20651 | N/A | N/A | AGGACACACCTGACCA | 31 | AF | 2458 |
| | 20678 | 20693 | | | | | | |
| | 20720 | 20735 | | | | | | |
| | 20762 | 20777 | | | | | | |
| | 20804 | 20819 | | | | | | |
| 1242652 | 20936 | 20951 | N/A | N/A | AGCATCAGAACACACC | 11 | AF | 2459 |
| | 21062 | 21077 | | | | | | |
| 1242676 | 22484 | 22499 | N/A | N/A | CCTATAAGGACAATCA | 50 | AF | 2460 |
| 1242699 | 23139 | 23154 | N/A | N/A | CCATGAAGACTTACCC | 99 | AF | 2461 |
| 1242723 | 23471 | 23486 | N/A | N/A | TGCGATAACTTGCATG | 100 | AF | 2462 |
| 1242747 | 23822 | 23837 | N/A | N/A | ATGATTATTAGTGGGT | 11 | AF | 2463 |
| 1242771 | 24159 | 24174 | N/A | N/A | CTAAATTGGAGGTCCC | 53 | AF | 2464 |
| 1242795 | 24450 | 24465 | N/A | N/A | AGATATGGTCACATCT | 97 | AF | 2465 |
| 1242819 | 25019 | 25034 | N/A | N/A | GTAACTACATAGAGCA | 18 | AF | 2466 |
| 1242843 | 25886 | 25901 | N/A | N/A | TGTAAATGGCTCTCTC | 71 | AF | 2467 |
| 1242867 | 26404 | 26419 | N/A | N/A | GCAAGATGACATTCCA | 48 | AF | 2468 |
| 1242891 | 26758 | 26773 | N/A | N/A | GCATGGAAATTTATCC | 38 | AF | 2469 |
| 1242915 | 27107 | 27122 | N/A | N/A | TACCTAACACATAGGC | 52 | AF | 2470 |
| | 27125 | 27140 | | | | | | |
| 1242939 | 27563 | 27578 | N/A | N/A | GACTCAAAATGGAGTG | 55 | AF | 2471 |
| 1242963 | 28617 | 28632 | N/A | N/A | ACCAAGCACGGATATC | 55 | AF | 2472 |
| 1242987 | 28834 | 28849 | N/A | N/A | GTAGTAGTAGAAATTG | 72 | AF | 1213 |
| 1243011 | 29178 | 29193 | N/A | N/A | CCAATTAAGGAAGAGT | 105 | AF | 2473 |
| 1243035 | 29474 | 29489 | N/A | N/A | GTACTATTCTTGAGTC | 54 | AF | 2474 |
| 1243059 | 31213 | 31228 | N/A | N/A | GATTATCTTGTGGCCA | 58 | AF | 2475 |
| 1243083 | 31514 | 31529 | N/A | N/A | CTAACTAGCTTCAAGC | 106 | AF | 2476 |
| 1243107 | 33025 | 33040 | N/A | N/A | TCGGGTAGAAGAGAGT | 80 | AF | 2477 |
| 1243131 | 33888 | 33903 | N/A | N/A | CTCCATTATGTTGGCA | 44 | AF | 2478 |
| 1243155 | 34116 | 34131 | N/A | N/A | CAGTCTAAAGCAGCTT | 44 | AF | 2479 |
| 1243179 | 34400 | 34415 | N/A | N/A | TAAAGGTGAGGCCCTT | 59 | AF | 2480 |
| 1243203 | 34609 | 34624 | N/A | N/A | ACACATTGCATTTGCC | 38 | AF | 2481 |
| 1243227 | 32157 | 32172 | N/A | N/A | ACTATGTAAAGACCCT | 42 | AF | 2482 |
| 1243251 | 9827 | 9842 | N/A | N/A | TGGGCTAAGAAAGGTC | 84 | AF | 2483 |
| 1232737 | 5138 | 5153 | 90 | 105 | ATGCCATCTTGACCCA | 60 | AH | 22 |
| 1301167 | 27196 | 27211 | N/A | N/A | ATTGAGACAGGCAGTA | 79 | AH | 2484 |
| 1301198 | 12701 | 12716 | N/A | N/A | GATGTAGCTGTGGCAA | 50 | AH | 2485 |
| 1301203 | 6740 | 6755 | N/A | N/A | GGGAATTCCGACACAT | 57 | AH | 2486 |
| 1301222 | 17664 | 17679 | N/A | N/A | TATCGAGCATCATGGT | 40 | AH | 2487 |
| 1301243 | 23533 | 23548 | N/A | N/A | CTCTCCTAGTGTAGAG | 110 | AH | 2488 |
| 1301273 | 18857 | 18872 | N/A | N/A | GTGCAGTAACATATCC | 51 | AH | 2489 |
| 1301284 | 20419 | 20434 | N/A | N/A | AAGTGAAGCGGGCGGT | 77 | AH | 2490 |
| 1301292 | 20424 | 20439 | N/A | N/A | TTTGTAAGTGAAGCGG | 24 | AH | 2491 |
| 1301298 | 22898 | 22913 | N/A | N/A | CAAGGAAGCACCCGTA | 69 | AH | 2492 |
| 1301301 | 22429 | 22444 | N/A | N/A | ATAATGTCCCCGAGGC | 37 | AH | 2493 |
| 1301314 | 25034 | 25049 | N/A | N/A | TAGGTATTGACAATAG | 26 | AH | 2494 |
| 1301324 | 29463 | 29478 | N/A | N/A | GAGTCAAATTAAGCCC | 29 | AH | 2495 |
| 1301349 | 26596 | 26611 | N/A | N/A | TGGTGATACGGTTACT | 48 | AH | 2496 |
| 1232737 | 5138 | 5153 | 90 | 105 | ATGCCATCTTGACCCA | 54 | AI | 22 |
| 1301174 | 27202 | 27217 | N/A | N/A | AGCAGTATTGAGACAG | 38 | AI | 2497 |
| 1301193 | 11266 | 11281 | 1569 | 1584 | AGCAGCTCATGATCAG | 41 | AI | 2498 |
| 1301194 | 6739 | 6754 | N/A | N/A | GGAATTCCGACACATG | 49 | AI | 2499 |
| 1301202 | 12700 | 12715 | N/A | N/A | ATGTAGCTGTGGCAAC | 66 | AI | 2500 |
| 1301228 | 23491 | 23506 | N/A | N/A | TGTAGAGGCTGCATGC | 30 | AI | 2501 |
| 1301238 | 25162 | 25177 | N/A | N/A | CGACCTATAAGGACCC | 28 | AI | 2502 |
| 1301263 | 18347 | 18362 | N/A | N/A | TTAACACTTGCTGTGC | 42 | AI | 2503 |
| 1301272 | 19269 | 19284 | N/A | N/A | AGACACTAGAGCCTCA | 35 | AI | 2504 |
| 1301347 | 25824 | 25839 | N/A | N/A | ATGATATGTTTACACC | 34 | AI | 2505 |
| 1232737 | 5138 | 5153 | 90 | 105 | ATGCCATCTTGACCCA | 77 | AJ | 22 |
| 1301177 | 27371 | 27386 | N/A | N/A | GCAGAGCATTTAGGAC | 80 | AJ | 2506 |
| 1301220 | 23281 | 23296 | N/A | N/A | TTATATGCCTCCAGTC | 68 | AJ | 2507 |
| 1301224 | 23306 | 23321 | N/A | N/A | ATTATCTTATTAGCAG | 53 | AJ | 2508 |
| 1301259 | 18755 | 18770 | N/A | N/A | TTTAAGCCACCGAACA | 102 | AJ | 2509 |
| 1301262 | 18346 | 18361 | N/A | N/A | TAACACTTGCTGTGCA | 68 | AJ | 2510 |
| 1301274 | 19884 | 19899 | N/A | N/A | TCTTGATTAGTTTCCC | 23 | AJ | 2511 |
| 1301281 | 20275 | 20290 | N/A | N/A | TGACGATTTCATCCCA | 30 | AJ | 2512 |
| 1301337 | 25821 | 25836 | N/A | N/A | ATATGTTTACACCAAG | 63 | AJ | 2513 |
| 1301346 | 26955 | 26970 | N/A | N/A | TGATTAATGCCACTTA | 31 | AJ | 2514 |
| 1232737 | 5138 | 5153 | 90 | 105 | ATGCCATCTTGACCCA | 64 | AK | 22 |
| 1301172 | 27094 | 27109 | N/A | N/A | GGCTATACCTAACACG | 28 | AK | 2515 |
| 1301176 | 10303 | 10318 | 1103 | 1118 | AAGGTACTCCAGTAAA | 60 | AK | 2516 |
| 1301218 | 17663 | 17678 | N/A | N/A | ATCGAGCATCATGGTT | 30 | AK | 2517 |
| 1301226 | 23500 | 23515 | N/A | N/A | CTTTCCTAGTGTAGAG | 65 | AK | 2518 |
| 1301255 | 17992 | 18007 | N/A | N/A | TCAACCCATACAAAGC | 50 | AK | 2519 |
| 1301295 | 22428 | 22443 | N/A | N/A | TAATGTCCCCGAGGCT | 41 | AK | 2520 |
| 1301308 | 24554 | 24569 | N/A | N/A | AGTCAAATTGCCAAGG | 45 | AK | 2521 |
| 1301336 | 25820 | 25835 | N/A | N/A | TATGTTTACACCAAGC | 16 | AK | 2522 |
| 1301344 | 26954 | 26969 | N/A | N/A | GATTAATGCCACTTAT | 56 | AK | 2523 |
| 1232737 | 5138 | 5153 | 90 | 105 | ATGCCATCTTGACCCA | 63 | AL | 22 |
| 1301170 | 27194 | 27209 | N/A | N/A | TGAGACAGGCAGTACA | 52 | AL | 2524 |
| 1301178 | 27370 | 27385 | N/A | N/A | CAGAGCATTTAGGACC | 80 | AL | 2525 |
| 1301184 | 11256 | 11271 | 1559 | 1574 | GATCAGGTCCCCCAGG | 81 | AL | 2526 |
| 1301205 | 16640 | 16655 | 2958 | 2973 | GACTCTGGCTGGTGCT | 71 | AL | 2527 |
| 1301231 | 11046 | 11061 | 1349 | 1364 | CTCCATCTTAATGGGA | 93 | AL | 2528 |
| 1301257 | 18754 | 18769 | N/A | N/A | TTAAGCCACCGAACAG | 69 | AL | 2529 |
| 1301275 | 20418 | 20433 | N/A | N/A | AGTGAAGCGGGCGGTG | 90 | AL | 2530 |
| 1301286 | 20591 | 20606 | N/A | N/A | ATACACCTGACCAGAG | 65 | AL | 2531 |
| 1301310 | 22905 | 22920 | N/A | N/A | CCATGGACAAGGAAGC | 71 | AL | 2532 |
| 1301348 | 26952 | 26967 | N/A | N/A | TTAATGCCACTTATAG | 73 | AL | 2533 |
| 1232737 | 5138 | 5153 | 90 | 105 | ATGCCATCTTGACCCA | 75 | AM | 22 |
| 1301169 | 27193 | 27208 | N/A | N/A | GAGACAGGCAGTACAC | 82 | AM | 2534 |
| 1301191 | 11263 | 11278 | 1566 | 1581 | AGCTCATGATCAGGTC | 49 | AM | 2535 |
| 1301208 | 15314 | 15329 | N/A | N/A | TCAGAGTAAGGCAGCT | 48 | AM | 2536 |
| 1301223 | 23280 | 23295 | N/A | N/A | TATATGCCTCCAGTCC | 60 | AM | 2537 |
| 1301269 | 19877 | 19892 | N/A | N/A | TAGTTTCCCCGTCACA | 64 | AM | 2538 |
| 1301296 | 22897 | 22912 | N/A | N/A | AAGGAAGCACCCGTAC | 114 | AM | 2539 |
| 1301312 | 22903 | 22918 | N/A | N/A | ATGGACAAGGAAGCAC | 68 | AM | 2540 |
| 1301316 | 26783 | 26798 | N/A | N/A | CCAATCGATAGATCTA | 44 | AM | 2541 |
| 1301331 | 27020 | 27035 | N/A | N/A | CTATACCTAACACACA | 98 | AM | 2542 |
| | 27056 | 27071 | | | | | | |
| 1301342 | 25740 | 25755 | N/A | N/A | AATTGAGAGGTATATG | 65 | AM | 2543 |
| 1232737 | 5138 | 5153 | 90 | 105 | ATGCCATCTTGACCCA | 87 | AN | 22 |
| 1301173 | 26961 | 26976 | N/A | N/A | CTCGACTGATTAATGC | 33 | AN | 2544 |
| 1301187 | 11955 | 11970 | 2258 | 2273 | TTGGAACAGGTTCATC | 94 | AN | 2545 |
| 1301188 | 5153 | 5168 | 105 | 120 | AACAACCACTTCACGA | 97 | AN | 2546 |
| 1301204 | 17662 | 17677 | N/A | N/A | TCGAGCATCATGGTTG | 17 | AN | 2547 |
| 1301209 | 15309 | 15324 | N/A | N/A | GTAAGGCAGCTGCCAT | 98 | AN | 2548 |
| 1301227 | 23532 | 23547 | N/A | N/A | TCTCCTAGTGTAGAGG | 80 | AN | 2549 |
| 1301288 | 20423 | 20438 | N/A | N/A | TTGTAAGTGAAGCGGG | 70 | AN | 2550 |
| 1232737 | 5138 | 5153 | 90 | 105 | ATGCCATCTTGACCCA | 55 | AO | 22 |
| 1301166 | 27134 | 27149 | N/A | N/A | ATGTAGCTATACCTAA | 88 | AO | 2551 |
| 1301210 | 15260 | 15275 | N/A | N/A | CTCCAGTCAGAGTCTG | 28 | AO | 2552 |
| 1301219 | 23279 | 23294 | N/A | N/A | ATATGCCTCCAGTCCT | 64 | AO | 2553 |
| 1301229 | 23499 | 23514 | N/A | N/A | TTTCCTAGTGTAGAGG | 49 | AO | 2554 |
| 1301248 | 17991 | 18006 | N/A | N/A | CAACCCATACAAAGCA | 49 | AO | 2555 |
| 1301251 | 17696 | 17711 | N/A | N/A | TCTATGAACATGGCCC | 35 | AO | 2556 |
| 1301279 | 20417 | 20432 | N/A | N/A | GTGAAGCGGGCGGTGT | 71 | AO | 2557 |
| 1232737 | 5138 | 5153 | 90 | 105 | ATGCCATCTTGACCCA | 65 | AP | 22 |
| 1301171 | 26960 | 26975 | N/A | N/A | TCGACTGATTAATGCC | 49 | AP | 2558 |
| 1301197 | 12705 | 12720 | N/A | N/A | TTATGATGTAGCTGTG | 89 | AP | 2559 |
| 1301221 | 21595 | 21610 | N/A | N/A | ATATGAGGACCCAGGG | 61 | AP | 2560 |
| 1301232 | 23531 | 23546 | N/A | N/A | CTCCTAGTGTAGAGGC | 55 | AP | 2561 |
| 1301250 | 17989 | 18004 | N/A | N/A | ACCCATACAAAGCATT | 55 | AP | 2562 |
| 1301260 | 18753 | 18768 | N/A | N/A | TAAGCCACCGAACAGC | 58 | AP | 2563 |
| 1301300 | 22896 | 22911 | N/A | N/A | AGGAAGCACCCGTACC | 89 | AP | 2564 |
| 1301304 | 22902 | 22917 | N/A | N/A | TGGACAAGGAAGCACC | 70 | AP | 2565 |
| 1301327 | 26788 | 26803 | N/A | N/A | ATGCCCCAATCGATAG | 82 | AP | 2566 |
| 1301334 | 35770 | 35785 | 4123 | 4138 | ATTACATGAGGTCACC | 65 | AP | 2567 |
| 1301345 | 26600 | 26615 | N/A | N/A | TATTTGGTGATACGGT | 36 | AP | 2568 |
| 1232737 | 5138 | 5153 | 90 | 105 | ATGCCATCTTGACCCA | 59 | AQ | 22 |
| 1301179 | 27363 | 27378 | N/A | N/A | TTTAGGACCGTCCCCC | 75 | AQ | 2569 |
| 1301211 | 15187 | 15202 | N/A | N/A | CTCCCGTCAGAGTCTG | 56 | AQ | 2570 |
| 1301339 | 25817 | 25832 | N/A | N/A | GTTTACACCAAGCATG | 66 | AQ | 2571 |
| 1232737 | 5138 | 5153 | 90 | 105 | ATGCCATCTTGACCCA | 65 | AR | 22 |
| 1301180 | 27369 | 27384 | N/A | N/A | AGAGCATTTAGGACCG | 53 | AR | 2572 |
| 1301207 | 17661 | 17676 | N/A | N/A | CGAGCATCATGGTTGT | 28 | AR | 2573 |
| 1301215 | 21594 | 21609 | N/A | N/A | TATGAGGACCCAGGGC | 51 | AR | 2574 |
| 1301235 | 25165 | 25180 | N/A | N/A | GTACGACCTATAAGGA | 91 | AR | 2575 |
| 1301246 | 17988 | 18003 | N/A | N/A | CCCATACAAAGCATTC | 64 | AR | 2576 |
| 1301264 | 19881 | 19896 | N/A | N/A | TGATTAGTTTCCCCGT | 57 | AR | 2577 |
| 1301268 | 19469 | 19484 | N/A | N/A | GATGAAGAGTGTGATC | 92 | AR | 2578 |
| 1301282 | 20416 | 20431 | N/A | N/A | TGAAGCGGGCGGTGTG | 84 | AR | 2579 |
| 1301285 | 20422 | 20437 | N/A | N/A | TGTAAGTGAAGCGGGC | 37 | AR | 2580 |
| 1301311 | 23818 | 23833 | N/A | N/A | TTATTAGTGGGTATTC | 74 | AR | 2581 |
| 1232737 | 5138 | 5153 | 90 | 105 | ATGCCATCTTGACCCA | 55 | AS | 22 |
| 1301182 | 27200 | 27215 | N/A | N/A | CAGTATTGAGACAGGC | 35 | AS | 2582 |
| 1301185 | 11982 | 11997 | 2285 | 2300 | GTAGAACTTCTCGCAG | 73 | AS | 2583 |
| 1301186 | 12470 | 12485 | 2773 | 2788 | AGGGACAGTGACTCCA | 90 | AS | 2584 |
| 1301233 | 11044 | 11059 | 1347 | 1362 | CCATCTTAATGGGACT | 56 | AS | 2585 |
| 1301261 | 18354 | 18369 | N/A | N/A | GCGGACTTTAACACTT | 47 | AS | 2586 |
| 1301287 | 20590 | 20605 | N/A | N/A | TACACCTGACCAGAGA | 40 | AS | 2587 |
| 1301338 | 25816 | 25831 | N/A | N/A | TTTACACCAAGCATGT | 94 | AS | 2588 |
| 1301341 | 31084 | 31099 | 3528 | 3543 | AGAGTAGTTTGATCCC | 53 | AS | 2589 |
| 1232737 | 5138 | 5153 | 90 | 105 | ATGCCATCTTGACCCA | 57 | AT | 22 |
| 1301199 | 14487 | 14502 | N/A | N/A | GAAATGGGTGCTGAGC | 25 | AT | 2590 |
| | 14633 | 14648 | | | | | | |
| | 14706 | 14721 | | | | | | |
| | 14779 | 14794 | | | | | | |
| | 14998 | 15013 | | | | | | |
| | 15071 | 15086 | | | | | | |
| 1301230 | 23299 | 23314 | N/A | N/A | TATTAGCAGCAGTATA | 75 | AT | 2591 |
| 1301239 | 25158 | 25173 | N/A | N/A | CTATAAGGACCCAGCC | 59 | AT | 2592 |
| 1301245 | 17444 | 17459 | N/A | N/A | ATTAACATTAGGTCTT | 40 | AT | 2593 |
| 1301283 | 20273 | 20288 | N/A | N/A | ACGATTTCATCCCAGC | 19 | AT | 2594 |
| 1301317 | 25038 | 25053 | N/A | N/A | AGGTTAGGTATTGACA | 32 | AT | 2595 |
| 1301325 | 26787 | 26802 | N/A | N/A | TGCCCCAATCGATAGA | 83 | AT | 2596 |
| 1301330 | 28765 | 28780 | N/A | N/A | CTGGTAACTATTAAGC | 77 | AT | 2597 |
| 1301333 | 27021 | 27036 | N/A | N/A | GCTATACCTAACACAC | 44 | AT | 2598 |
| | 27057 | 27072 | | | | | | |
| 1301335 | 25815 | 25830 | N/A | N/A | TTACACCAAGCATGTG | 60 | AT | 2599 |
| 1232737 | 5138 | 5153 | 90 | 105 | ATGCCATCTTGACCCA | 52 | AU | 22 |
| 1301190 | 11298 | 11313 | 1601 | 1616 | GATCTTGTGGATGGGT | 29 | AU | 2600 |
| 1301206 | 17660 | 17675 | N/A | N/A | GAGCATCATGGTTGTT | 29 | AU | 2601 |
| 1301214 | 23298 | 23313 | N/A | N/A | ATTAGCAGCAGTATAC | 50 | AU | 2602 |
| 1301236 | 25164 | 25179 | N/A | N/A | TACGACCTATAAGGAC | 53 | AU | 2603 |
| 1301249 | 17983 | 17998 | N/A | N/A | ACAAAGCATTCTGACC | 40 | AU | 2604 |
| 1301297 | 22901 | 22916 | N/A | N/A | GGACAAGGAAGCACCC | 55 | AU | 2605 |
| 1301309 | 23825 | 23840 | N/A | N/A | TGCATGATTATTAGTG | 67 | AU | 2606 |
| 1301340 | 25814 | 25829 | N/A | N/A | TACACCAAGCATGTGT | 103 | AU | 2607 |
| 1232737 | 5138 | 5153 | 90 | 105 | ATGCCATCTTGACCCA | 43 | AV | 22 |
| 1301212 | 16643 | 16658 | 2961 | 2976 | TTAGACTCTGGCTGGT | 47 | AV | 2608 |
| 1301217 | 23283 | 23298 | N/A | N/A | CATTATATGCCTCCAG | 34 | AV | 2609 |
| 1301225 | 23492 | 23507 | N/A | N/A | GTGTAGAGGCTGCATG | 43 | AV | 2610 |
| 1301241 | 23502 | 23517 | N/A | N/A | CTCTTTCCTAGTGTAG | 105 | AV | 2611 |
| 1301244 | 17982 | 17997 | N/A | N/A | CAAAGCATTCTGACCA | 42 | AV | 2612 |
| 1301270 | 19273 | 19288 | N/A | N/A | TGATAGACACTAGAGC | 63 | AV | 2613 |
| 1301271 | 12143 | 12158 | 2446 | 2461 | TACCCCTTTTCGAATT | 81 | AV | 2614 |
| 1301277 | 20272 | 20287 | N/A | N/A | CGATTTCATCCCAGCC | 30 | AV | 2615 |
| 1301320 | 25018 | 25033 | N/A | N/A | TAACTACATAGAGCAT | 74 | AV | 2616 |
| 1301321 | 26779 | 26794 | N/A | N/A | TCGATAGATCTACACA | 44 | AV | 2617 |
| 1301323 | 25037 | 25052 | N/A | N/A | GGTTAGGTATTGACAA | 40 | AV | 2618 |
| 1301332 | 26970 | 26985 | N/A | N/A | CATAAAAGTCTCGACT | 85 | AV | 2619 |
| 1232737 | 5138 | 5153 | 90 | 105 | ATGCCATCTTGACCCA | 65 | AW | 22 |
| 1301165 | 26958 | 26973 | N/A | N/A | GACTGATTAATGCCAC | 15 | AW | 2620 |
| 1301175 | 11001 | 11016 | 1304 | 1319 | GCCGATGGCCAGAAGC | 70 | AW | 2621 |
| 1301181 | 27199 | 27214 | N/A | N/A | AGTATTGAGACAGGCA | 45 | AW | 2622 |
| 1301189 | 11981 | 11996 | 2284 | 2299 | TAGAACTTCTCGCAGT | 66 | AW | 2623 |
| 1301192 | 11231 | 11246 | 1534 | 1549 | GTCACAAGGCTCACCT | 69 | AW | 2624 |
| 1301201 | 12703 | 12718 | N/A | N/A | ATGATGTAGCTGTGGC | 102 | AW | 2625 |
| 1301216 | 23282 | 23297 | N/A | N/A | ATTATATGCCTCCAGT | 58 | AW | 2626 |
| 1301247 | 17460 | 17475 | N/A | N/A | TTAAAGGAGTGACTAG | 48 | AW | 2627 |
| 1301278 | 20278 | 20293 | N/A | N/A | GTTTGACGATTTCATC | 33 | AW | 2628 |
| 1301291 | 12450 | 12465 | 2753 | 2768 | ATGACAGTTCTCAATG | 83 | AW | 2629 |
| 1301293 | 20420 | 20435 | N/A | N/A | TAAGTGAAGCGGGCGG | 58 | AW | 2630 |
| 1301294 | 12457 | 12472 | 2760 | 2775 | CCACCCGATGACAGTT | 82 | AW | 2631 |
| 1301299 | 22430 | 22445 | N/A | N/A | CATAATGTCCCCGAGG | 43 | AW | 2632 |
| 1301313 | 23824 | 23839 | N/A | N/A | GCATGATTATTAGTGG | 29 | AW | 2633 |
| 1232737 | 5138 | 5153 | 90 | 105 | ATGCCATCTTGACCCA | 43 | AX | 22 |
| 1301168 | 27131 | 27146 | N/A | N/A | TAGCTATACCTAACAC | 81 | AX | 2634 |
| 1301234 | 23501 | 23516 | N/A | N/A | TCTTTCCTAGTGTAGA | 78 | AX | 2635 |
| 1301240 | 25157 | 25172 | N/A | N/A | TATAAGGACCCAGCCT | 59 | AX | 2636 |
| 1301252 | 17459 | 17474 | N/A | N/A | TAAAGGAGTGACTAGA | 57 | AX | 2637 |
| 1301253 | 17443 | 17458 | N/A | N/A | TTAACATTAGGTCTTG | 43 | AX | 2638 |
| 1301258 | 18353 | 18368 | N/A | N/A | CGGACTTTAACACTTG | 44 | AX | 2639 |
| 1301266 | 19272 | 19287 | N/A | N/A | GATAGACACTAGAGCC | 24 | AX | 2640 |
| 1301303 | 20771 | 20786 | N/A | N/A | GAATGCATCAGGACAC | 71 | AX | 2641 |
| 1301319 | 26786 | 26801 | N/A | N/A | GCCCCAATCGATAGAT | 72 | AX | 2642 |
| 1301328 | 28764 | 28779 | N/A | N/A | TGGTAACTATTAAGCA | 66 | AX | 2643 |
| 1232737 | 5138 | 5153 | 90 | 105 | ATGCCATCTTGACCCA | 69 | AY | 22 |
| 1301183 | 27206 | 27221 | N/A | N/A | CTTGAGCAGTATTGAG | 77 | AY | 2644 |
| 1301242 | 25156 | 25171 | N/A | N/A | ATAAGGACCCAGCCTG | 77 | AY | 2645 |
| 1301254 | 18756 | 18771 | N/A | N/A | ATTTAAGCCACCGAAC | 96 | AY | 2646 |
| 1301267 | 19879 | 19894 | N/A | N/A | ATTAGTTTCCCCGTCA | 44 | AY | 2647 |
| 1301276 | 20271 | 20286 | N/A | N/A | GATTTCATCCCAGCCC | 47 | AY | 2648 |
| 1301302 | 20769 | 20784 | N/A | N/A | ATGCATCAGGACACAC | 61 | AY | 2649 |
| 1301305 | 25017 | 25032 | N/A | N/A | AACTACATAGAGCATA | 58 | AY | 2650 |
| 1301322 | 25036 | 25051 | N/A | N/A | GTTAGGTATTGACAAT | 66 | AY | 2651 |
| 1301326 | 26969 | 26984 | N/A | N/A | ATAAAAGTCTCGACTG | 75 | AY | 2652 |
| 1301329 | 28763 | 28778 | N/A | N/A | GGTAACTATTAAGCAA | 38 | AY | 2653 |
| 1232737 | 5138 | 5153 | 90 | 105 | ATGCCATCTTGACCCA | 63 | AZ | 22 |
| 1301195 | 12702 | 12717 | N/A | N/A | TGATGTAGCTGTGGCA | 44 | AZ | 2654 |
| 1301196 | 5283 | 5298 | 235 | 250 | ATGCTTACCAGAAAGT | 40 | AZ | 2655 |
| 1301213 | 15183 | 15198 | N/A | N/A | CGTCAGAGTCTGTCCT | 24 | AZ | 2656 |
| 1301237 | 25163 | 25178 | N/A | N/A | ACGACCTATAAGGACC | 46 | AZ | 2657 |
| 1301265 | 19270 | 19285 | N/A | N/A | TAGACACTAGAGCCTC | 23 | AZ | 2658 |
| 1301289 | 20426 | 20441 | N/A | N/A | GGTTTGTAAGTGAAGC | 30 | AZ | 2659 |
| 1301306 | 25016 | 25031 | N/A | N/A | ACTACATAGAGCATAT | 65 | AZ | 2660 |
| 1301315 | 26785 | 26800 | N/A | N/A | CCCCAATCGATAGATC | 65 | AZ | 2661 |
| 1301343 | 29466 | 29481 | N/A | N/A | CTTGAGTCAAATTAAG | 99 | AZ | 2662 |

TABLE 3
Reduction of NLRP3 RNA by 3-10-3 cEt modified
oligonucleotides with uniform phosphorothioate
internucleoside linkages at a concentration
of 2000 nM in THP-1 cells

| | SEQ | SEQ | SEQ | SEQ | SEQ | SEQ | | | | |
|---|---|---|---|---|---|---|---|---|---|---|
| | ID | ID | ID | ID | ID | ID | | | | |
| | No: 3 | No: 3 | No: 4 | No: 4 | No: 5 | No: 5 | | NLRP3 | | SEQ |
| Compound | Start | Stop | Start | Stop | Start | Stop | Sequence | (% | | ID |
| Number | Site | Site | Site | Site | Site | Site | (5′ to 3′) | UTC) | AID | NO |
| 1242249 | 3065 | 3080 | 3270 | 3285 | N/A | N/A | CACCAACCAGAGCTTC | 72 | I | 672 |
| 1242250 | 3068 | 3083 | 3273 | 3288 | N/A | N/A | ATTCACCAACCAGAGC | 76 | J | 749 |
| 1242251 | 3069 | 3084 | 3274 | 3289 | N/A | N/A | AATTCACCAACCAGAG | 91 | K | 826 |
| 1242252 | 3070 | 3085 | 3275 | 3290 | N/A | N/A | GAATTCACCAACCAGA | 63 | L | 903 |
| 1242257 | N/A | N/A | 25 | 40 | N/A | N/A | ATCCAGATGCCAGCCT | 75 | Q | 1288 |
| 1242258 | N/A | N/A | 30 | 45 | N/A | N/A | TCCTCATCCAGATGCC | 74 | R | 1365 |
| 1242259 | N/A | N/A | 31 | 46 | N/A | N/A | TTCCTCATCCAGATGC | 63 | S | 1442 |
| 1242260 | N/A | N/A | N/A | N/A | 32 | 47 | AAGGTTTCCCCAGATG | 92 | T | 1519 |
| 1242261 | N/A | N/A | N/A | N/A | 37 | 52 | GAAGAAAGGTTTCCCC | 77 | U | 1596 |
| 1242246 | 2890 | 2905 | N/A | N/A | N/A | N/A | AACCCATGAGAACAGG | 75 | AC | 2211 |
| 1242247 | 2893 | 2908 | N/A | N/A | N/A | N/A | CCCAACCCATGAGAAC | 98 | AD | 2288 |
| 1242248 | 2894 | 2909 | N/A | N/A | N/A | N/A | CCCCAACCCATGAGAA | 88 | AE | 2366 |

### Example 2: Effect of Mixed MOE and cEt, Uniform Phosphorothioate Modified Oligonucleotides on Human NLRP3 RNA In Vitro, Single Dose

[0330] Modified oligonucleotides complementary to human NLRP3 nucleic acid were designed and tested for their single dose effects on NLRP3 RNA in vitro. The modified oligonucleotides were tested in a series of experiments that had the same culture conditions.

[0331] The modified oligonucleotides in the table below are 16 nucleosides in length, wherein the sugar motif for the modified oligonucleotides is (from 5′ to 3′): kekdddddddddeekk; wherein each “d” represents a 2′-β-D-deoxyribosyl sugar moiety, each “e” represents a 2′-MOE sugar moiety, and each “k” represents a cEt sugar moiety. The internucleoside linkage motif for the modified oligonucleotides is (from 5′ to 3′): sssssssssssssss; wherein each “s” represents a phosphorothioate internucleoside linkage. Each cytosine residue is a 5-methyl cytosine.

[0332] “Start site” indicates the 5′-most nucleoside to which the modified oligonucleotide is complementary in the target nucleic acid sequence. “Stop site” indicates the 3′-most nucleoside to which the modified oligonucleotide is complementary in the target nucleic acid sequence. Each modified oligonucleotide listed in the tables below is 100% complementary to SEQ ID NO: 1 (described herein above), to SEQ ID NO: 2 (described herein above), or to both. “N/A” indicates that the modified oligonucleotide is not 100% complementary to that particular target nucleic acid sequence.

[0333] Cultured THP-1 cells were treated with modified oligonucleotide at a concentration of 2000 nM by electroporation at a density of 300,000 cells per well. After a treatment period of approximately 24 hours, total RNA was isolated from the cells and NLRP3 RNA levels were measured by quantitative real-time RTPCR. NLRP3 RNA levels were measured by human primer-probe set RTS37509 (described herein above). NLRP3 RNA levels were normalized to total RNA content, as measured by RIBOGREEN®. Reduction of NLRP3 RNA is presented in the tables below as percent NLRP3 RNA relative to the amount of NLRP3 RNA in untreated control cells (% UTC).

[0334] Each separate experimental analysis described in this example is identified by a letter ID in the table column below labeled “AID” (Analysis ID). In the table below, Compound No. 1232737 (described herein above) was used as a benchmark on multiple plates.

TABLE 4
Reduction of NLRP3 RNA by modified oligonucleotides
with a mixedMOE/cEt sugar motif and uniform
phosphorothioate internucleosidelinkages at a
concentration of 2000 nM in THP-1 cells

| | SEQ ID | SEQ | SEQ ID | SEQ ID | | | | |
|---|---|---|---|---|---|---|---|---|
| | No: 1 | ID No: | No: 2 | No: 2 | | NLRP3 | | SEQ |
| Compound | Start | 1 Stop | Start | Stop | Sequence | (% | | ID |
| Number | Site | Site | Site | Site | (5′ to 3′) | UTC) | AID | NO |
| 1232737 | 5138 | 5153 | 90 | 105 | ATGCCATCTTGACCCA | 60 | AH | 22 |
| 1299495 | 5249 | 5264 | 201 | 216 | CAGGAGTGTGTCCTGA | 100 | AH | 2663 |
| 1299554 | 10928 | 10943 | 1231 | 1246 | CGTTTGTTGAGGCTCA | 38 | AH | 1417 |
| 1299568 | 11259 | 11274 | 1562 | 1577 | CATGATCAGGTCCCCC | 48 | AH | 1957 |
| 1299584 | 11296 | 11311 | 1599 | 1614 | TCTTGTGGATGGGTGG | 62 | AH | 2188 |
| 1299585 | 11302 | 11317 | 1605 | 1620 | TCACGATCTTGTGGAT | 73 | AH | 803 |
| 1299614 | 12276 | 12291 | 2579 | 2594 | GGCTTTCACTTCAATC | 52 | AH | 2664 |
| 1299642 | 14574 | 14589 | N/A | N/A | AGGTGCCATCTAGAGG | 19 | AH | 1528 |
| | 14866 | 14881 | | | | | | |
| | 15156 | 15171 | | | | | | |
| | 15229 | 15244 | | | | | | |
| 1299648 | 16737 | 16752 | 3055 | 3070 | AATCTCCGAATGTTAC | 94 | AH | 271 |
| 1299651 | 16730 | 16745 | 3048 | 3063 | GAATGTTACAGCCAGG | 55 | AH | 2275 |
| 1299693 | 11041 | 11056 | 1344 | 1359 | TCTTAATGGGACTCAC | 61 | AH | 263 |
| 1299700 | 23281 | 23296 | N/A | N/A | TTATATGCCTCCAGTC | 66 | AH | 2507 |
| 1299713 | 23491 | 23506 | N/A | N/A | TGTAGAGGCTGCATGC | 32 | AH | 2501 |
| 1299724 | 23496 | 23511 | N/A | N/A | CCTAGTGTAGAGGCTG | 36 | AH | 77 |
| | 23529 | 23544 | | | | | | |
| 1299730 | 25162 | 25177 | N/A | N/A | CGACCTATAAGGACCC | 37 | AH | 2502 |
| 1299767 | 18352 | 18367 | N/A | N/A | GGACTTTAACACTTGC | 27 | AH | 2665 |
| 1299795 | 19879 | 19894 | N/A | N/A | ATTAGTTTCCCCGTCA | 45 | AH | 2647 |
| 1299863 | 24554 | 24569 | N/A | N/A | AGTCAAATTGCCAAGG | 44 | AH | 2521 |
| 1299869 | 25079 | 25094 | N/A | N/A | AGGCCGCTCTGTTTGT | 72 | AH | 2666 |
| 1299881 | 26785 | 26800 | N/A | N/A | CCCCAATCGATAGATC | 105 | AH | 2661 |
| 1299889 | 27026 | 27041 | N/A | N/A | CATAGGCTATACCTAA | 69 | AH | 393 |
| | 27062 | 27077 | | | | | | |
| | 27098 | 27113 | | | | | | |
| | 27116 | 27131 | | | | | | |
| 1299898 | 28755 | 28770 | N/A | N/A | TTAAGCAACGGTTACA | 56 | AH | 1472 |
| 1299909 | 28763 | 28778 | N/A | N/A | GGTAACTATTAAGCAA | 58 | AH | 2653 |
| 1299916 | 31081 | 31096 | 3525 | 3540 | GTAGTTTGATCCCCTT | 56 | AH | 1897 |
| 1232737 | 5138 | 5153 | 90 | 105 | ATGCCATCTTGACCCA | 54 | AI | 22 |
| 1299497 | 27094 | 27109 | N/A | N/A | GGCTATACCTAACACG | 41 | AI | 2515 |
| 1299500 | 26962 | 26977 | N/A | N/A | TCTCGACTGATTAATG | 46 | AI | 2667 |
| 1299503 | 26957 | 26972 | N/A | N/A | ACTGATTAATGCCACT | 33 | AI | 1392 |
| 1299556 | 5147 | 5162 | 99 | 114 | CACTTCACGATGCCAT | 56 | AI | 330 |
| 1299588 | 11972 | 11987 | 2275 | 2290 | TCGCAGTCCACTTCCT | 74 | AI | 2668 |
| 1299598 | 11979 | 11994 | 2282 | 2297 | GAACTTCTCGCAGTCC | 40 | AI | 1114 |
| 1299611 | 12463 | 12478 | 2766 | 2781 | GTGACTCCACCCGATG | 51 | AI | 2272 |
| 1299646 | 16727 | 16742 | 3045 | 3060 | TGTTACAGCCAGGATG | 74 | AI | 2669 |
| 1299647 | 16641 | 16656 | 2959 | 2974 | AGACTCTGGCTGGTGC | 66 | AI | 2670 |
| 1299659 | 15111 | 15126 | N/A | N/A | CAGTCAGAGTCTGTCC | 18 | AI | 914 |
| | 15257 | 15272 | | | | | | |
| 1299719 | 23500 | 23515 | N/A | N/A | CTTTCCTAGTGTAGAG | 80 | AI | 2518 |
| 1299745 | 23038 | 23053 | 3313 | 3328 | TAGAGTCTGGTCAGGG | 57 | AI | 1893 |
| 1299764 | 17448 | 17463 | N/A | N/A | CTAGATTAACATTAGG | 57 | AI | 915 |
| 1299769 | 12140 | 12155 | 2443 | 2458 | CCCTTTTCGAATTTGC | 34 | AI | 497 |
| 1299798 | 19887 | 19902 | N/A | N/A | GATTCTTGATTAGTTT | 50 | AI | 2671 |
| 1299809 | 20276 | 20291 | N/A | N/A | TTGACGATTTCATCCC | 39 | AI | 2672 |
| 1299810 | 20419 | 20434 | N/A | N/A | AAGTGAAGCGGGCGGT | 84 | AI | 2490 |
| 1299841 | 22429 | 22444 | N/A | N/A | ATAATGTCCCCGAGGC | 57 | AI | 2493 |
| 1299852 | 23822 | 23837 | N/A | N/A | ATGATTATTAGTGGGT | 79 | AI | 2463 |
| 1299855 | 14500 | 14515 | N/A | N/A | GGTGCTATCTAGAGAA | 37 | AI | 1604 |
| | 14646 | 14661 | | | | | | |
| | 14719 | 14734 | | | | | | |
| | 14792 | 14807 | | | | | | |
| | 14938 | 14953 | | | | | | |
| | 15011 | 15026 | | | | | | |
| | 15084 | 15099 | | | | | | |
| 1299890 | 27022 | 27037 | N/A | N/A | GGCTATACCTAACACA | 42 | AI | 162 |
| | 27058 | 27073 | | | | | | |
| | 27112 | 27127 | | | | | | |
| 1299929 | 25745 | 25760 | N/A | N/A | GTTGAAATTGAGAGGT | 37 | AI | 1235 |
| 1232737 | 5138 | 5153 | 90 | 105 | ATGCCATCTTGACCCA | 77 | AJ | 22 |
| 1299510 | 27195 | 27210 | N/A | N/A | TTGAGACAGGCAGTAC | 81 | AJ | 2673 |
| 1299520 | 27365 | 27380 | N/A | N/A | CATTTAGGACCGTCCC | 49 | AJ | 164 |
| 1299530 | 6018 | 6033 | 970 | 985 | CTGTTGATCGCAGCGA | 65 | AJ | 2183 |
| 1299535 | 6025 | 6040 | 977 | 992 | GTCTCTCCTGTTGATC | 73 | AJ | 2674 |
| 1299537 | 10303 | 10318 | 1103 | 1118 | AAGGTACTCCAGTAAA | 68 | AJ | 2516 |
| 1299551 | 5146 | 5161 | 98 | 113 | ACTTCACGATGCCATC | 50 | AJ | 715 |
| 1299561 | 11007 | 11022 | 1310 | 1325 | GGTCTTGCCGATGGCC | 65 | AJ | 2675 |
| 1299583 | 11264 | 11279 | 1567 | 1582 | CAGCTCATGATCAGGT | 60 | AJ | 2676 |
| 1299601 | 11978 | 11993 | 2281 | 2296 | AACTTCTCGCAGTCCA | 41 | AJ | 1037 |
| 1299613 | 5166 | 5181 | 118 | 133 | ACAGTTTACGGTGAAC | 53 | AJ | 562 |
| 1299640 | 14678 | 14693 | N/A | N/A | CTCCAATCAGAGTCTG | 56 | AJ | 1991 |
| | 14824 | 14839 | | | | | | |
| | 14970 | 14985 | | | | | | |
| 1299677 | 11040 | 11055 | 1343 | 1358 | CTTAATGGGACTCACG | 58 | AJ | 186 |
| 1299681 | 17670 | 17685 | N/A | N/A | GGAATATATCGAGCAT | 36 | AJ | 1377 |
| 1299686 | 20704 | 20719 | N/A | N/A | GAGAGCTCCGGAATAG | 57 | AJ | 842 |
| | 20746 | 20761 | | | | | | |
| | 20914 | 20929 | | | | | | |
| 1299714 | 5137 | 5152 | 89 | 104 | TGCCATCTTGACCCAT | 71 | AJ | 2408 |
| 1299716 | 11046 | 11061 | 1349 | 1364 | CTCCATCTTAATGGGA | 90 | AJ | 2528 |
| 1299759 | 17697 | 17712 | N/A | N/A | ATCTATGAACATGGCC | 43 | AJ | 1839 |
| 1299815 | 20592 | 20607 | N/A | N/A | AATACACCTGACCAGA | 81 | AJ | 1457 |
| 1299828 | 12455 | 12470 | 2758 | 2773 | ACCCGATGACAGTTCT | 43 | AJ | 2195 |
| 1299839 | 22898 | 22913 | N/A | N/A | CAAGGAAGCACCCGTA | 72 | AJ | 2492 |
| 1299870 | 25077 | 25092 | N/A | N/A | GCCGCTCTGTTTGTGA | 60 | AJ | 2677 |
| 1299879 | 26784 | 26799 | N/A | N/A | CCCAATCGATAGATCT | 47 | AJ | 468 |
| 1299899 | 28762 | 28777 | N/A | N/A | GTAACTATTAAGCAAC | 78 | AJ | 1626 |
| 1299912 | 29463 | 29478 | N/A | N/A | GAGTCAAATTAAGCCC | 53 | AJ | 2495 |
| 1299915 | 31018 | 31033 | 3462 | 3477 | TAGTGCTGAGTACCGA | 68 | AJ | 1049 |
| 1299932 | 35773 | 35788 | 4126 | 4141 | CTAATTACATGAGGTC | 49 | AJ | 2364 |
| 1299939 | 5247 | 5262 | 199 | 214 | GGAGTGTGTCCTGAGC | 57 | AJ | 2255 |
| 1232737 | 5138 | 5153 | 90 | 105 | ATGCCATCTTGACCCA | 64 | AK | 22 |
| 1299564 | 11006 | 11021 | 1309 | 1324 | GTCTTGCCGATGGCCA | 47 | AK | 1956 |
| 1299571 | 11258 | 11273 | 1561 | 1576 | ATGATCAGGTCCCCCA | 50 | AK | 1880 |
| 1299591 | 11955 | 11970 | 2258 | 2273 | TTGGAACAGGTTCATC | 71 | AK | 2545 |
| 1299604 | 5153 | 5168 | 105 | 120 | AACAACCACTTCACGA | 75 | AK | 2546 |
| 1299639 | 14679 | 14694 | N/A | N/A | GCTCCAATCAGAGTCT | 64 | AK | 2068 |
| | 14825 | 14840 | | | | | | |
| | 14971 | 14986 | | | | | | |
| 1299649 | 16735 | 16750 | 3053 | 3068 | TCTCCGAATGTTACAG | 69 | AK | 117 |
| 1299664 | 5136 | 5151 | 88 | 103 | GCCATCTTGACCCATC | 38 | AK | 2678 |
| 1299688 | 21597 | 21612 | N/A | N/A | CAATATGAGGACCCAG | 52 | AK | 2305 |
| 1299705 | 23495 | 23510 | N/A | N/A | CTAGTGTAGAGGCTGC | 17 | AK | 615 |
| | 23528 | 23543 | | | | | | |
| 1299717 | 23533 | 23548 | N/A | N/A | CTCTCCTAGTGTAGAG | 95 | AK | 2488 |
| 1299735 | 23000 | 23015 | 3275 | 3290 | TGCAAGATCCTGACAA | 70 | AK | 2046 |
| 1299738 | 12133 | 12148 | 2436 | 2451 | CGAATTTGCCATAGTT | 33 | AK | 2423 |
| 1299766 | 18755 | 18770 | N/A | N/A | TTTAAGCCACCGAACA | 74 | AK | 2509 |
| 1299779 | 18856 | 18871 | N/A | N/A | TGCAGTAACATATCCA | 37 | AK | 1532 |
| 1299803 | 19878 | 19893 | N/A | N/A | TTAGTTTCCCCGTCAC | 63 | AK | 2679 |
| 1299822 | 20424 | 20439 | N/A | N/A | TTTGTAAGTGAAGCGG | 34 | AK | 2491 |
| 1299858 | 25034 | 25049 | N/A | N/A | TAGGTATTGACAATAG | 53 | AK | 2494 |
| 1299891 | 27023 | 27038 | N/A | N/A | AGGCTATACCTAACAC | 36 | AK | 1546 |
| | 27059 | 27074 | | | | | | |
| | 27095 | 27110 | | | | | | |
| | 27113 | 27128 | | | | | | |
| 1299910 | 29462 | 29477 | N/A | N/A | AGTCAAATTAAGCCCA | 39 | AK | 245 |
| 1299927 | 25740 | 25755 | N/A | N/A | AATTGAGAGGTATATG | 79 | AK | 2543 |
| 1299935 | 26602 | 26617 | N/A | N/A | CTTATTTGGTGATACG | 43 | AK | 1237 |
| 1232737 | 5138 | 5153 | 90 | 105 | ATGCCATCTTGACCCA | 63 | AL | 22 |
| 1299501 | 26961 | 26976 | N/A | N/A | CTCGACTGATTAATGC | 62 | AL | 2544 |
| 1299515 | 27202 | 27217 | N/A | N/A | AGCAGTATTGAGACAG | 55 | AL | 2497 |
| 1299521 | 27364 | 27379 | N/A | N/A | ATTTAGGACCGTCCCC | 89 | AL | 87 |
| 1299525 | 6017 | 6032 | 969 | 984 | TGTTGATCGCAGCGAA | 48 | AL | 2106 |
| 1299553 | 10927 | 10942 | 1230 | 1245 | GTTTGTTGAGGCTCAC | 63 | AL | 2680 |
| 1299593 | 11301 | 11316 | 1604 | 1619 | CACGATCTTGTGGATG | 69 | AL | 726 |
| 1299605 | 12275 | 12290 | 2578 | 2593 | GCTTTCACTTCAATCC | 44 | AL | 1347 |
| 1299623 | 12491 | 12506 | 2794 | 2809 | GGCATGTTATGGAGAA | 72 | AL | 1118 |
| 1299638 | 14680 | 14695 | N/A | N/A | GGCTCCAATCAGAGTC | 91 | AL | 2453 |
| | 14826 | 14841 | | | | | | |
| | 14972 | 14987 | | | | | | |
| 1299656 | 15115 | 15130 | N/A | N/A | GTTCCAGTCAGAGTCT | 39 | AL | 2681 |
| 1299698 | 23280 | 23295 | N/A | N/A | TATATGCCTCCAGTCC | 68 | AL | 2537 |
| 1299723 | 23532 | 23547 | N/A | N/A | TCTCCTAGTGTAGAGG | 72 | AL | 2549 |
| 1299763 | 17447 | 17462 | N/A | N/A | TAGATTAACATTAGGT | 90 | AL | 838 |
| 1299785 | 19269 | 19284 | N/A | N/A | AGACACTAGAGCCTCA | 55 | AL | 2504 |
| 1299801 | 19883 | 19898 | N/A | N/A | CTTGATTAGTTTCCCC | 31 | AL | 1764 |
| 1299812 | 20275 | 20290 | N/A | N/A | TGACGATTTCATCCCA | 33 | AL | 2512 |
| 1299823 | 20423 | 20438 | N/A | N/A | TTGTAAGTGAAGCGGG | 88 | AL | 2550 |
| 1299838 | 22897 | 22912 | N/A | N/A | AAGGAAGCACCCGTAC | 102 | AL | 2539 |
| 1299856 | 24553 | 24568 | N/A | N/A | GTCAAATTGCCAAGGA | 55 | AL | 1003 |
| 1299857 | 25032 | 25047 | N/A | N/A | GGTATTGACAATAGTA | 29 | AL | 2682 |
| 1299868 | 25076 | 25091 | N/A | N/A | CCGCTCTGTTTGTGAT | 94 | AL | 2683 |
| 1299893 | 27021 | 27036 | N/A | N/A | GCTATACCTAACACAC | 64 | AL | 2598 |
| | 27057 | 27072 | | | | | | |
| 1299923 | 31080 | 31095 | 3524 | 3539 | TAGTTTGATCCCCTTG | 63 | AL | 1820 |
| 1299938 | 26601 | 26616 | N/A | N/A | TTATTTGGTGATACGG | 36 | AL | 1160 |
| 1299941 | 25820 | 25835 | N/A | N/A | TATGTTTACACCAAGC | 22 | AL | 2522 |
| 1232737 | 5138 | 5153 | 90 | 105 | ATGCCATCTTGACCCA | 75 | AM | 22 |
| 1299532 | 27370 | 27385 | N/A | N/A | CAGAGCATTTAGGACC | 79 | AM | 2525 |
| 1299542 | 6023 | 6038 | 975 | 990 | CTCTCCTGTTGATCGC | 58 | AM | 798 |
| 1299548 | 10925 | 10940 | 1228 | 1243 | TTGTTGAGGCTCACAC | 79 | AM | 2684 |
| 1299552 | 5145 | 5160 | 97 | 112 | CTTCACGATGCCATCT | 56 | AM | 253 |
| 1299596 | 11983 | 11998 | 2286 | 2301 | TGTAGAACTTCTCGCA | 46 | AM | 2685 |
| 1299669 | 17663 | 17678 | N/A | N/A | ATCGAGCATCATGGTT | 31 | AM | 2517 |
| 1299683 | 17669 | 17684 | N/A | N/A | GAATATATCGAGCATC | 30 | AM | 68 |
| 1299689 | 21596 | 21611 | N/A | N/A | AATATGAGGACCCAGG | 51 | AM | 151 |
| 1299712 | 23305 | 23320 | N/A | N/A | TTATCTTATTAGCAGC | 55 | AM | 922 |
| 1299722 | 23499 | 23514 | N/A | N/A | TTTCCTAGTGTAGAGG | 76 | AM | 2554 |
| 1299728 | 25161 | 25176 | N/A | N/A | GACCTATAAGGACCCA | 38 | AM | 81 |
| 1299737 | 23035 | 23050 | 3310 | 3325 | AGTCTGGTCAGGGAAT | 33 | AM | 2686 |
| 1299762 | 17696 | 17711 | N/A | N/A | TCTATGAACATGGCCC | 46 | AM | 2556 |
| 1299773 | 12139 | 12154 | 2442 | 2457 | CCTTTTCGAATTTGCC | 29 | AM | 420 |
| 1299780 | 18760 | 18775 | N/A | N/A | AAGCATTTAAGCCACC | 49 | AM | 1301 |
| 1299811 | 20418 | 20433 | N/A | N/A | AGTGAAGCGGGCGGTG | 92 | AM | 2530 |
| 1299820 | 20591 | 20606 | N/A | N/A | ATACACCTGACCAGAG | 82 | AM | 2531 |
| 1299831 | 12454 | 12469 | 2757 | 2772 | CCCGATGACAGTTCTC | 52 | AM | 268 |
| 1299842 | 22427 | 22442 | N/A | N/A | AATGTCCCCGAGGCTC | 62 | AM | 2687 |
| 1299880 | 26789 | 26804 | N/A | N/A | TATGCCCCAATCGATA | 73 | AM | 2688 |
| 1299896 | 27107 | 27122 | N/A | N/A | TACCTAACACATAGGC | 72 | AM | 2470 |
| | 27125 | 27140 | | | | | | |
| 1299924 | 31017 | 31032 | 3461 | 3476 | AGTGCTGAGTACCGAG | 35 | AM | 972 |
| 1232737 | 5138 | 5153 | 90 | 105 | ATGCCATCTTGACCCA | 87 | AN | 22 |
| 1299508 | 6015 | 6030 | 967 | 982 | TTGATCGCAGCGAAGA | 74 | AN | 2029 |
| 1299523 | 27201 | 27216 | N/A | N/A | GCAGTATTGAGACAGG | 41 | AN | 931 |
| 1299538 | 10302 | 10317 | 1102 | 1117 | AGGTACTCCAGTAAAC | 74 | AN | 2689 |
| 1299557 | 11013 | 11028 | 1316 | 1331 | CGTCTTGGTCTTGCCG | 73 | AN | 2690 |
| 1299562 | 11005 | 11020 | 1308 | 1323 | TCTTGCCGATGGCCAG | 68 | AN | 2691 |
| 1299573 | 11235 | 11250 | 1538 | 1553 | CTGTGTCACAAGGCTC | 48 | AN | 1572 |
| 1299576 | 11263 | 11278 | 1566 | 1581 | AGCTCATGATCAGGTC | 69 | AN | 2535 |
| 1299606 | 12462 | 12477 | 2765 | 2780 | TGACTCCACCCGATGA | 100 | AN | 2692 |
| 1299622 | 12487 | 12502 | 2790 | 2805 | TGTTATGGAGAAACCC | 64 | AN | 576 |
| 1299628 | 5172 | 5187 | 124 | 139 | TGTATTACAGTTTACG | 66 | AN | 255 |
| 1299636 | 14681 | 14696 | N/A | N/A | GGGCTCCAATCAGAGT | 95 | AN | 2145 |
| | 14827 | 14842 | | | | | | |
| | 14973 | 14988 | | | | | | |
| 1299662 | 16647 | 16662 | 2965 | 2980 | TCAGTTAGACTCTGGC | 38 | AN | 1505 |
| 1299707 | 11045 | 11060 | 1348 | 1363 | TCCATCTTAATGGGAC | 73 | AN | 2693 |
| 1299736 | 23033 | 23048 | 3308 | 3323 | TCTGGTCAGGGAATGG | 68 | AN | 1662 |
| 1299768 | 18753 | 18768 | N/A | N/A | TAAGCCACCGAACAGC | 67 | AN | 2563 |
| 1299774 | 17992 | 18007 | N/A | N/A | TCAACCCATACAAAGC | 68 | AN | 2519 |
| 1299800 | 12145 | 12160 | 2448 | 2463 | AATACCCCTTTTCGAA | 96 | AN | 36 |
| 1299805 | 20274 | 20289 | N/A | N/A | GACGATTTCATCCCAG | 15 | AN | 1918 |
| 1299849 | 23821 | 23836 | N/A | N/A | TGATTATTAGTGGGTA | 107 | AN | 2078 |
| 1299882 | 26783 | 26798 | N/A | N/A | CCAATCGATAGATCTA | 62 | AN | 2541 |
| 1299892 | 26973 | 26988 | N/A | N/A | ATGCATAAAAGTCTCG | 39 | AN | 85 |
| 1299895 | 28761 | 28776 | N/A | N/A | TAACTATTAAGCAACG | 86 | AN | 90 |
| 1299900 | 27111 | 27126 | N/A | N/A | GCTATACCTAACACAT | 93 | AN | 2162 |
| | 27129 | 27144 | | | | | | |
| 1299920 | 31079 | 31094 | 3523 | 3538 | AGTTTGATCCCCTTGT | 67 | AN | 1743 |
| 1232737 | 5138 | 5153 | 90 | 105 | ATGCCATCTTGACCCA | 55 | AO | 22 |
| 1299504 | 5133 | 5148 | 85 | 100 | ATCTTGACCCATCAGC | 77 | AO | 21 |
| 1299513 | 27106 | 27121 | N/A | N/A | ACCTAACACATAGGCT | 66 | AO | 2085 |
| | 27124 | 27139 | | | | | | |
| 1299539 | 10301 | 10316 | 1101 | 1116 | GGTACTCCAGTAAACC | 67 | AO | 2694 |
| 1299579 | 11300 | 11315 | 1603 | 1618 | ACGATCTTGTGGATGG | 38 | AO | 649 |
| 1299603 | 11977 | 11992 | 2280 | 2295 | ACTTCTCGCAGTCCAC | 55 | AO | 960 |
| 1299634 | 12709 | 12724 | N/A | N/A | GGCATTATGATGTAGC | 63 | AO | 832 |
| 1299635 | 14580 | 14595 | N/A | N/A | TAAGGCAGGTGCCATC | 38 | AO | 1913 |
| | 14872 | 14887 | | | | | | |
| | 15162 | 15177 | | | | | | |
| | 15235 | 15250 | | | | | | |
| 1299653 | 16734 | 16749 | 3052 | 3067 | CTCCGAATGTTACAGC | 68 | AO | 40 |
| 1299672 | 17662 | 17677 | N/A | N/A | TCGAGCATCATGGTTG | 37 | AO | 2547 |
| 1299687 | 20584 | 20599 | N/A | N/A | TGACCAGAGAGCTCCG | 33 | AO | 150 |
| | 20710 | 20725 | | | | | | |
| | 20752 | 20767 | | | | | | |
| | 20920 | 20935 | | | | | | |
| 1299709 | 23494 | 23509 | N/A | N/A | TAGTGTAGAGGCTGCA | 22 | AO | 538 |
| | 23527 | 23542 | | | | | | |
| 1299729 | 25160 | 25175 | N/A | N/A | ACCTATAAGGACCCAG | 58 | AO | 619 |
| 1299783 | 18759 | 18774 | N/A | N/A | AGCATTTAAGCCACCG | 33 | AO | 1224 |
| 1299786 | 19877 | 19892 | N/A | N/A | TAGTTTCCCCGTCACA | 47 | AO | 2538 |
| 1299791 | 19268 | 19283 | N/A | N/A | GACACTAGAGCCTCAG | 32 | AO | 1686 |
| 1299885 | 26972 | 26987 | N/A | N/A | TGCATAAAAGTCTCGA | 34 | AO | 1469 |
| 1299930 | 35770 | 35785 | 4123 | 4138 | ATTACATGAGGTCACC | 51 | AO | 2567 |
| 1299940 | 26600 | 26615 | N/A | N/A | TATTTGGTGATACGGT | 37 | AO | 2568 |
| 1299948 | 16646 | 16661 | 2964 | 2979 | CAGTTAGACTCTGGCT | 56 | AO | 1428 |
| 1232737 | 5138 | 5153 | 90 | 105 | ATGCCATCTTGACCCA | 65 | AP | 22 |
| 1299518 | 27363 | 27378 | N/A | N/A | TTTAGGACCGTCCCCC | 83 | AP | 2569 |
| 1299522 | 27200 | 27215 | N/A | N/A | CAGTATTGAGACAGGC | 54 | AP | 2582 |
| 1299543 | 5143 | 5158 | 95 | 110 | TCACGATGCCATCTTG | 70 | AP | 2332 |
| 1299575 | 5151 | 5166 | 103 | 118 | CAACCACTTCACGATG | 79 | AP | 946 |
| 1299597 | 11982 | 11997 | 2285 | 2300 | GTAGAACTTCTCGCAG | 63 | AP | 2583 |
| 1299612 | 12461 | 12476 | 2764 | 2779 | GACTCCACCCGATGAC | 57 | AP | 2695 |
| 1299676 | 17668 | 17683 | N/A | N/A | AATATATCGAGCATCA | 41 | AP | 606 |
| 1299680 | 17675 | 17690 | N/A | N/A | GAAATGGAATATATCG | 101 | AP | 1608 |
| 1299701 | 21604 | 21619 | N/A | N/A | TCTTATACAATATGAG | 65 | AP | 305 |
| 1299710 | 23303 | 23318 | N/A | N/A | ATCTTATTAGCAGCAG | 37 | AP | 76 |
| 1299721 | 23498 | 23513 | N/A | N/A | TTCCTAGTGTAGAGGC | 42 | AP | 2696 |
| 1299744 | 25166 | 25181 | N/A | N/A | TGTACGACCTATAAGG | 111 | AP | 2697 |
| 1299747 | 17446 | 17461 | N/A | N/A | AGATTAACATTAGGTC | 60 | AP | 761 |
| 1299750 | 23043 | 23058 | 3318 | 3333 | CCACATAGAGTCTGGT | 88 | AP | 582 |
| 1299765 | 12138 | 12153 | 2441 | 2456 | CTTTTCGAATTTGCCA | 59 | AP | 343 |
| 1299788 | 19469 | 19484 | N/A | N/A | GATGAAGAGTGTGATC | 46 | AP | 2578 |
| 1299824 | 20422 | 20437 | N/A | N/A | TGTAAGTGAAGCGGGC | 75 | AP | 2580 |
| 1299833 | 12453 | 12468 | 2756 | 2771 | CCGATGACAGTTCTCA | 54 | AP | 2118 |
| 1299864 | 23827 | 23842 | N/A | N/A | AGTGCATGATTATTAG | 87 | AP | 2698 |
| 1299873 | 25075 | 25090 | N/A | N/A | CGCTCTGTTTGTGATA | 84 | AP | 2699 |
| 1299901 | 28760 | 28775 | N/A | N/A | AACTATTAAGCAACGG | 44 | AP | 628 |
| 1299902 | 27099 | 27114 | N/A | N/A | ACATAGGCTATACCTA | 69 | AP | 394 |
| | 27117 | 27132 | | | | | | |
| 1299913 | 29461 | 29476 | N/A | N/A | GTCAAATTAAGCCCAT | 84 | AP | 168 |
| 1299921 | 31016 | 31031 | 3460 | 3475 | GTGCTGAGTACCGAGG | 45 | AP | 895 |
| 1232737 | 5138 | 5153 | 90 | 105 | ATGCCATCTTGACCCA | 59 | AQ | 22 |
| 1299511 | 27134 | 27149 | N/A | N/A | ATGTAGCTATACCTAA | 110 | AQ | 2551 |
| 1299549 | 10923 | 10938 | 1226 | 1241 | GTTGAGGCTCACACTC | 72 | AQ | 1340 |
| 1299574 | 11233 | 11248 | 1536 | 1551 | GTGTCACAAGGCTCAC | 61 | AQ | 1418 |
| 1299578 | 11299 | 11314 | 1602 | 1617 | CGATCTTGTGGATGGG | 35 | AQ | 2343 |
| 1299589 | 11952 | 11967 | 2255 | 2270 | GAACAGGTTCATCCTC | 70 | AQ | 34 |
| 1299615 | 12486 | 12501 | 2789 | 2804 | GTTATGGAGAAACCCC | 51 | AQ | 887 |
| 1299633 | 14477 | 14492 | N/A | N/A | CTGAGCCTCCTACCGG | 55 | AQ | 2219 |
| | 14623 | 14638 | | | | | | |
| | 14769 | 14784 | | | | | | |
| | 14915 | 14930 | | | | | | |
| | 15061 | 15076 | | | | | | |
| 1299697 | 23301 | 23316 | N/A | N/A | CTTATTAGCAGCAGTA | 35 | AQ | 845 |
| 1299746 | 17445 | 17460 | N/A | N/A | GATTAACATTAGGTCT | 60 | AQ | 144 |
| 1299772 | 18354 | 18369 | N/A | N/A | GCGGACTTTAACACTT | 63 | AQ | 2586 |
| 1299787 | 12144 | 12159 | 2447 | 2462 | ATACCCCTTTTCGAAT | 72 | AQ | 2347 |
| 1299792 | 18860 | 18875 | N/A | N/A | ACTGTGCAGTAACATA | 61 | AQ | 2700 |
| 1299802 | 19882 | 19897 | N/A | N/A | TTGATTAGTTTCCCCG | 30 | AQ | 1687 |
| 1299830 | 20929 | 20944 | N/A | N/A | GAACACACCTGACCAG | 84 | AQ | 1689 |
| | 21055 | 21070 | | | | | | |
| 1299846 | 22902 | 22917 | N/A | N/A | TGGACAAGGAAGCACC | 72 | AQ | 2565 |
| 1299850 | 23820 | 23835 | N/A | N/A | GATTATTAGTGGGTAT | 69 | AQ | 616 |
| 1299861 | 25020 | 25035 | N/A | N/A | AGTAACTACATAGAGC | 48 | AQ | 465 |
| 1299876 | 26782 | 26797 | N/A | N/A | CAATCGATAGATCTAC | 76 | AQ | 391 |
| 1299911 | 29459 | 29474 | N/A | N/A | CAAATTAAGCCCATTC | 81 | AQ | 2013 |
| 1299934 | 31084 | 31099 | 3528 | 3543 | AGAGTAGTTTGATCCC | 44 | AQ | 2589 |
| 1232737 | 5138 | 5153 | 90 | 105 | ATGCCATCTTGACCCA | 65 | AR | 22 |
| 1299514 | 27132 | 27147 | N/A | N/A | GTAGCTATACCTAACA | 66 | AR | 2701 |
| 1299527 | 6022 | 6037 | 974 | 989 | TCTCCTGTTGATCGCA | 27 | AR | 721 |
| 1299555 | 11011 | 11026 | 1314 | 1329 | TCTTGGTCTTGCCGAT | 55 | AR | 2702 |
| 1299563 | 11004 | 11019 | 1307 | 1322 | CTTGCCGATGGCCAGA | 55 | AR | 2703 |
| 1299577 | 11262 | 11277 | 1565 | 1580 | GCTCATGATCAGGTCC | 43 | AR | 2111 |
| 1299590 | 11948 | 11963 | 2251 | 2266 | AGGTTCATCCTCAGGA | 103 | AR | 729 |
| 1299595 | 11976 | 11991 | 2279 | 2294 | CTTCTCGCAGTCCACT | 70 | AR | 2704 |
| 1299616 | 5171 | 5186 | 123 | 138 | GTATTACAGTTTACGG | 52 | AR | 178 |
| 1299632 | 14572 | 14587 | N/A | N/A | GTGCCATCTAGAGGGA | 83 | AR | 1374 |
| | 14864 | 14879 | | | | | | |
| | 15154 | 15169 | | | | | | |
| | 15227 | 15242 | | | | | | |
| 1299660 | 16645 | 16660 | 2963 | 2978 | AGTTAGACTCTGGCTG | 68 | AR | 1351 |
| 1299671 | 15187 | 15202 | N/A | N/A | CTCCCGTCAGAGTCTG | 66 | AR | 2570 |
| 1299702 | 21603 | 21618 | N/A | N/A | CTTATACAATATGAGG | 48 | AR | 843 |
| 1299706 | 11044 | 11059 | 1347 | 1362 | CCATCTTAATGGGACT | 50 | AR | 2585 |
| 1299740 | 23007 | 23022 | 3282 | 3297 | ATACTGATGCAAGATC | 70 | AR | 738 |
| 1299797 | 20273 | 20288 | N/A | N/A | ACGATTTCATCCCAGC | 29 | AR | 2594 |
| 1299819 | 20590 | 20605 | N/A | N/A | TACACCTGACCAGAGA | 70 | AR | 2587 |
| 1299825 | 12452 | 12467 | 2755 | 2770 | CGATGACAGTTCTCAA | 79 | AR | 2426 |
| 1299865 | 14501 | 14516 | N/A | N/A | AGGTGCTATCTAGAGA | 26 | AR | 1681 |
| | 14647 | 14662 | | | | | | |
| | 14720 | 14735 | | | | | | |
| | 14793 | 14808 | | | | | | |
| | 14939 | 14954 | | | | | | |
| | 15012 | 15027 | | | | | | |
| | 15085 | 15100 | | | | | | |
| 1299894 | 26971 | 26986 | N/A | N/A | GCATAAAAGTCTCGAC | 44 | AR | 623 |
| 1299906 | 31015 | 31030 | 3459 | 3474 | TGCTGAGTACCGAGGA | 49 | AR | 818 |
| 1299918 | 31077 | 31092 | 3521 | 3536 | TTTGATCCCCTTGTCT | 101 | AR | 1589 |
| 1299943 | 25817 | 25832 | N/A | N/A | GTTTACACCAAGCATG | 56 | AR | 2571 |
| 1232737 | 5138 | 5153 | 90 | 105 | ATGCCATCTTGACCCA | 55 | AS | 22 |
| 1299496 | 26960 | 26975 | N/A | N/A | TCGACTGATTAATGCC | 32 | AS | 2558 |
| 1299531 | 27369 | 27384 | N/A | N/A | AGAGCATTTAGGACCG | 52 | AS | 2572 |
| 1299550 | 10883 | 10898 | 1186 | 1201 | TCAATGCACTGGAATC | 94 | AS | 2032 |
| 1299602 | 11975 | 11990 | 2278 | 2293 | TTCTCGCAGTCCACTT | 110 | AS | 2705 |
| 1299607 | 12460 | 12475 | 2763 | 2778 | ACTCCACCCGATGACA | 106 | AS | 2706 |
| 1299618 | 12704 | 12719 | N/A | N/A | TATGATGTAGCTGTGG | 47 | AS | 678 |
| 1299631 | 14478 | 14493 | N/A | N/A | GCTGAGCCTCCTACCG | 40 | AS | 2296 |
| | 14624 | 14639 | | | | | | |
| | 14770 | 14785 | | | | | | |
| | 14916 | 14931 | | | | | | |
| | 15062 | 15077 | | | | | | |
| 1299652 | 16733 | 16748 | 3051 | 3066 | TCCGAATGTTACAGCC | 82 | AS | 578 |
| 1299674 | 5293 | 5308 | 245 | 260 | AGTTAGCCAAATGCTT | 97 | AS | 410 |
| 1299675 | 17667 | 17682 | N/A | N/A | ATATATCGAGCATCAT | 76 | AS | 529 |
| 1299690 | 21594 | 21609 | N/A | N/A | TATGAGGACCCAGGGC | 80 | AS | 2574 |
| 1299720 | 23531 | 23546 | N/A | N/A | CTCCTAGTGTAGAGGC | 67 | AS | 2561 |
| 1299731 | 25159 | 25174 | N/A | N/A | CCTATAAGGACCCAGC | 81 | AS | 542 |
| 1299758 | 12137 | 12152 | 2440 | 2455 | TTTTCGAATTTGCCAT | 99 | AS | 2192 |
| 1299775 | 18859 | 18874 | N/A | N/A | CTGTGCAGTAACATAT | 85 | AS | 2707 |
| 1299782 | 18758 | 18773 | N/A | N/A | GCATTTAAGCCACCGA | 50 | AS | 1147 |
| 1299789 | 12143 | 12158 | 2446 | 2461 | TACCCCTTTTCGAATT | 111 | AS | 2614 |
| 1299799 | 19881 | 19896 | N/A | N/A | TGATTAGTTTCCCCGT | 43 | AS | 2577 |
| 1299807 | 20416 | 20431 | N/A | N/A | TGAAGCGGGCGGTGTG | 79 | AS | 2579 |
| 1299827 | 20698 | 20713 | N/A | N/A | TCCGGAATAGAGAAAG | 86 | AS | 381 |
| | 20740 | 20755 | | | | | | |
| | 20908 | 20923 | | | | | | |
| | 20992 | 21007 | | | | | | |
| 1299836 | 22895 | 22910 | N/A | N/A | GGAAGCACCCGTACCT | 76 | AS | 2708 |
| 1299872 | 25038 | 25053 | N/A | N/A | AGGTTAGGTATTGACA | 57 | AS | 2595 |
| 1299883 | 26787 | 26802 | N/A | N/A | TGCCCCAATCGATAGA | 74 | AS | 2596 |
| 1299942 | 26599 | 26614 | N/A | N/A | ATTTGGTGATACGGTT | 54 | AS | 2709 |
| 1232737 | 5138 | 5153 | 90 | 105 | ATGCCATCTTGACCCA | 57 | AT | 22 |
| 1299526 | 6021 | 6036 | 973 | 988 | CTCCTGTTGATCGCAG | 63 | AT | 644 |
| 1299541 | 10300 | 10315 | 1100 | 1115 | GTACTCCAGTAAACCC | 43 | AT | 2031 |
| 1299566 | 11232 | 11247 | 1535 | 1550 | TGTCACAAGGCTCACC | 74 | AT | 2710 |
| 1299580 | 5150 | 5165 | 102 | 117 | AACCACTTCACGATGC | 80 | AT | 871 |
| 1299600 | 11981 | 11996 | 2284 | 2299 | TAGAACTTCTCGCAGT | 85 | AT | 2623 |
| 1299610 | 12466 | 12481 | 2769 | 2784 | ACAGTGACTCCACCCG | 43 | AT | 656 |
| 1299617 | 12703 | 12718 | N/A | N/A | ATGATGTAGCTGTGGC | 30 | AT | 2625 |
| 1299630 | 14569 | 14584 | N/A | N/A | CCATCTAGAGGGATGG | 95 | AT | 1220 |
| | 14861 | 14876 | | | | | | |
| | 15151 | 15166 | | | | | | |
| | 15224 | 15239 | | | | | | |
| 1299655 | 5290 | 5305 | 242 | 257 | TAGCCAAATGCTTACC | 57 | AT | 1948 |
| 1299663 | 16644 | 16659 | 2962 | 2977 | GTTAGACTCTGGCTGG | 30 | AT | 1274 |
| 1299666 | 15185 | 15200 | N/A | N/A | CCCGTCAGAGTCTGTC | 38 | AT | 2711 |
| 1299670 | 17660 | 17675 | N/A | N/A | GAGCATCATGGTTGTT | 21 | AT | 2601 |
| 1299679 | 17673 | 17688 | N/A | N/A | AATGGAATATATCGAG | 49 | AT | 222 |
| 1299725 | 23502 | 23517 | N/A | N/A | CTCTTTCCTAGTGTAG | 91 | AT | 2611 |
| 1299770 | 17988 | 18003 | N/A | N/A | CCCATACAAAGCATTC | 64 | AT | 2576 |
| 1299790 | 19273 | 19288 | N/A | N/A | TGATAGACACTAGAGC | 70 | AT | 2613 |
| 1299813 | 20279 | 20294 | N/A | N/A | TGTTTGACGATTTCAT | 69 | AT | 2712 |
| 1299826 | 20697 | 20712 | N/A | N/A | CCGGAATAGAGAAAGC | 66 | AT | 304 |
| | 20739 | 20754 | | | | | | |
| | 20907 | 20922 | | | | | | |
| | 20991 | 21006 | | | | | | |
| 1299845 | 23825 | 23840 | N/A | N/A | TGCATGATTATTAGTG | 56 | AT | 2606 |
| 1299851 | 23817 | 23832 | N/A | N/A | TATTAGTGGGTATTCC | 87 | AT | 462 |
| 1299854 | 22901 | 22916 | N/A | N/A | GGACAAGGAAGCACCC | 62 | AT | 2605 |
| 1299860 | 25019 | 25034 | N/A | N/A | GTAACTACATAGAGCA | 61 | AT | 2466 |
| 1299866 | 26781 | 26796 | N/A | N/A | AATCGATAGATCTACA | 67 | AT | 314 |
| 1299904 | 28759 | 28774 | N/A | N/A | ACTATTAAGCAACGGT | 46 | AT | 551 |
| 1299907 | 31014 | 31029 | 3458 | 3473 | GCTGAGTACCGAGGAC | 36 | AT | 741 |
| 1299919 | 31022 | 31037 | 3466 | 3481 | TGATTAGTGCTGAGTA | 56 | AT | 1280 |
| 1232737 | 5138 | 5153 | 90 | 105 | ATGCCATCTTGACCCA | 52 | AU | 22 |
| 1299502 | 26959 | 26974 | N/A | N/A | CGACTGATTAATGCCA | 36 | AU | 2713 |
| 1299517 | 27362 | 27377 | N/A | N/A | TTAGGACCGTCCCCCG | 100 | AU | 2714 |
| 1299558 | 11010 | 11025 | 1313 | 1328 | CTTGGTCTTGCCGATG | 54 | AU | 2715 |
| 1299592 | 11947 | 11962 | 2250 | 2265 | GGTTCATCCTCAGGAA | 72 | AU | 652 |
| 1299619 | 5170 | 5185 | 122 | 137 | TATTACAGTTTACGGT | 45 | AU | 101 |
| 1299629 | 14573 | 14588 | N/A | N/A | GGTGCCATCTAGAGGG | 93 | AU | 1451 |
| | 14865 | 14880 | | | | | | |
| | 15155 | 15170 | | | | | | |
| | 15228 | 15243 | | | | | | |
| 1299678 | 20578 | 20593 | N/A | N/A | GAGAGCTCCGGAATAC | 35 | AU | 841 |
| | 20956 | 20971 | | | | | | |
| 1299692 | 20580 | 20595 | N/A | N/A | CAGAGAGCTCCGGAAT | 64 | AU | 918 |
| | 20706 | 20721 | | | | | | |
| | 20748 | 20763 | | | | | | |
| | 20916 | 20931 | | | | | | |
| | 20958 | 20973 | | | | | | |
| 1299711 | 23493 | 23508 | N/A | N/A | AGTGTAGAGGCTGCAT | 29 | AU | 2716 |
| 1299715 | 23497 | 23512 | N/A | N/A | TCCTAGTGTAGAGGCT | 23 | AU | 154 |
| | 23530 | 23545 | | | | | | |
| 1299732 | 25158 | 25173 | N/A | N/A | CTATAAGGACCCAGCC | 68 | AU | 2592 |
| 1299751 | 23041 | 23056 | 3316 | 3331 | ACATAGAGTCTGGTCA | 63 | AU | 505 |
| 1299816 | 20421 | 20436 | N/A | N/A | GTAAGTGAAGCGGGCG | 66 | AU | 2072 |
| 1299834 | 21014 | 21029 | N/A | N/A | AGGACACACCTGATCA | 59 | AU | 2717 |
| 1299835 | 12457 | 12472 | 2760 | 2775 | CCACCCGATGACAGTT | 78 | AU | 2631 |
| 1299859 | 25018 | 25033 | N/A | N/A | TAACTACATAGAGCAT | 59 | AU | 2616 |
| 1299874 | 25074 | 25089 | N/A | N/A | GCTCTGTTTGTGATAC | 56 | AU | 2389 |
| | 26262 | 26277 | | | | | | |
| 1299884 | 26786 | 26801 | N/A | N/A | GCCCCAATCGATAGAT | 86 | AU | 2642 |
| 1299905 | 5141 | 5156 | 93 | 108 | ACGATGCCATCTTGAC | 50 | AU | 2254 |
| 1232737 | 5138 | 5153 | 90 | 105 | ATGCCATCTTGACCCA | 43 | AV | 22 |
| 1299505 | 27199 | 27214 | N/A | N/A | AGTATTGAGACAGGCA | 40 | AV | 2622 |
| 1299506 | 27100 | 27115 | N/A | N/A | CACATAGGCTATACCT | 55 | AV | 1623 |
| | 27118 | 27133 | | | | | | |
| 1299533 | 27368 | 27383 | N/A | N/A | GAGCATTTAGGACCGT | 38 | AV | 1393 |
| 1299540 | 10297 | 10312 | 1097 | 1112 | CTCCAGTAAACCCATC | 91 | AV | 1877 |
| 1299546 | 11003 | 11018 | 1306 | 1321 | TTGCCGATGGCCAGAA | 76 | AV | 2718 |
| 1299565 | 11261 | 11276 | 1564 | 1579 | CTCATGATCAGGTCCC | 55 | AV | 2419 |
| 1299581 | 11298 | 11313 | 1601 | 1616 | GATCTTGTGGATGGGT | 62 | AV | 2600 |
| 1299650 | 16732 | 16747 | 3050 | 3065 | CCGAATGTTACAGCCA | 55 | AV | 501 |
| 1299667 | 17666 | 17681 | N/A | N/A | TATATCGAGCATCATG | 65 | AV | 452 |
| 1299682 | 17672 | 17687 | N/A | N/A | ATGGAATATATCGAGC | 32 | AV | 145 |
| 1299696 | 11043 | 11058 | 1346 | 1361 | CATCTTAATGGGACTC | 44 | AV | 417 |
| 1299726 | 25164 | 25179 | N/A | N/A | TACGACCTATAAGGAC | 96 | AV | 2603 |
| 1299742 | 23006 | 23021 | 3281 | 3296 | TACTGATGCAAGATCC | 65 | AV | 661 |
| 1299752 | 23040 | 23055 | 3315 | 3330 | CATAGAGTCTGGTCAG | 87 | AV | 428 |
| 1299771 | 18353 | 18368 | N/A | N/A | CGGACTTTAACACTTG | 58 | AV | 2639 |
| 1299817 | 12451 | 12466 | 2754 | 2769 | GATGACAGTTCTCAAT | 95 | AV | 2041 |
| 1299840 | 22431 | 22446 | N/A | N/A | GCATAATGTCCCCGAG | 6 | AV | 536 |
| 1299848 | 23824 | 23839 | N/A | N/A | GCATGATTATTAGTGG | 62 | AV | 2633 |
| 1299877 | 14504 | 14519 | N/A | N/A | GGAAGGTGCTATCTAG | 31 | AV | 1835 |
| | 14650 | 14665 | | | | | | |
| | 14723 | 14738 | | | | | | |
| | 14796 | 14811 | | | | | | |
| | 14942 | 14957 | | | | | | |
| | 15015 | 15030 | | | | | | |
| | 15088 | 15103 | | | | | | |
| 1299903 | 28758 | 28773 | N/A | N/A | CTATTAAGCAACGGTT | 49 | AV | 474 |
| 1299914 | 28765 | 28780 | N/A | N/A | CTGGTAACTATTAAGC | 73 | AV | 2597 |
| 1299925 | 31083 | 31098 | 3527 | 3542 | GAGTAGTTTGATCCCC | 57 | AV | 2051 |
| 1232737 | 5138 | 5153 | 90 | 105 | ATGCCATCTTGACCCA | 65 | AW | 22 |
| 1299498 | 27028 | 27043 | N/A | N/A | CCCATAGGCTATACCT | 40 | AW | 547 |
| | 27064 | 27079 | | | | | | |
| 1299512 | 27131 | 27146 | N/A | N/A | TAGCTATACCTAACAC | 74 | AW | 2634 |
| 1299534 | 27367 | 27382 | N/A | N/A | AGCATTTAGGACCGTC | 37 | AW | 1316 |
| 1299545 | 10880 | 10895 | 1183 | 1198 | ATGCACTGGAATCTGC | 53 | AW | 1801 |
| 1299560 | 11009 | 11024 | 1312 | 1327 | TTGGTCTTGCCGATGG | 78 | AW | 2719 |
| 1299569 | 5149 | 5164 | 101 | 116 | ACCACTTCACGATGCC | 42 | AW | 792 |
| 1299586 | 11974 | 11989 | 2277 | 2292 | TCTCGCAGTCCACTTC | 104 | AW | 2720 |
| 1299621 | 5169 | 5184 | 121 | 136 | ATTACAGTTTACGGTG | 60 | AW | 1331 |
| 1299627 | 14570 | 14585 | N/A | N/A | GCCATCTAGAGGGATG | 74 | AW | 1297 |
| | 14862 | 14877 | | | | | | |
| | 15152 | 15167 | | | | | | |
| | 15225 | 15240 | | | | | | |
| 1299654 | 16731 | 16746 | 3049 | 3064 | CGAATGTTACAGCCAG | 68 | AW | 2353 |
| 1299657 | 15112 | 15127 | N/A | N/A | CCAGTCAGAGTCTGTC | 10 | AW | 991 |
| | 15258 | 15273 | | | | | | |
| 1299673 | 15184 | 15199 | N/A | N/A | CCGTCAGAGTCTGTCC | 23 | AW | 2721 |
| 1299694 | 20583 | 20598 | N/A | N/A | GACCAGAGAGCTCCGG | 48 | AW | 73 |
| | 20709 | 20724 | | | | | | |
| | 20751 | 20766 | | | | | | |
| | 20919 | 20934 | | | | | | |
| 1299695 | 21600 | 21615 | N/A | N/A | ATACAATATGAGGACC | 55 | AW | 689 |
| 1299708 | 23492 | 23507 | N/A | N/A | GTGTAGAGGCTGCATG | 45 | AW | 2610 |
| 1299749 | 17443 | 17458 | N/A | N/A | TTAACATTAGGTCTTG | 54 | AW | 2638 |
| 1299761 | 12136 | 12151 | 2439 | 2454 | TTTCGAATTTGCCATA | 59 | AW | 266 |
| 1299776 | 18757 | 18772 | N/A | N/A | CATTTAAGCCACCGAA | 111 | AW | 224 |
| 1299778 | 18858 | 18873 | N/A | N/A | TGTGCAGTAACATATC | 63 | AW | 2722 |
| 1299796 | 20272 | 20287 | N/A | N/A | CGATTTCATCCCAGCC | 21 | AW | 2615 |
| 1299871 | 25036 | 25051 | N/A | N/A | GTTAGGTATTGACAAT | 58 | AW | 2651 |
| 1299875 | 26970 | 26985 | N/A | N/A | CATAAAAGTCTCGACT | 55 | AW | 2619 |
| 1232737 | 5138 | 5153 | 90 | 105 | ATGCCATCTTGACCCA | 43 | AX | 22 |
| 1299499 | 26958 | 26973 | N/A | N/A | GACTGATTAATGCCAC | 47 | AX | 2620 |
| 1299519 | 27206 | 27221 | N/A | N/A | CTTGAGCAGTATTGAG | 72 | AX | 2644 |
| 1299529 | 6020 | 6035 | 972 | 987 | TCCTGTTGATCGCAGC | 53 | AX | 2338 |
| 1299570 | 11231 | 11246 | 1534 | 1549 | GTCACAAGGCTCACCT | 53 | AX | 2624 |
| 1299572 | 5148 | 5163 | 100 | 115 | CCACTTCACGATGCCA | 33 | AX | 407 |
| 1299582 | 11297 | 11312 | 1600 | 1615 | ATCTTGTGGATGGGTG | 61 | AX | 2265 |
| 1299594 | 11304 | 11319 | 1607 | 1622 | TCTCACGATCTTGTGG | 72 | AX | 882 |
| 1299599 | 11980 | 11995 | 2283 | 2298 | AGAACTTCTCGCAGTC | 52 | AX | 2723 |
| 1299626 | 14571 | 14586 | N/A | N/A | TGCCATCTAGAGGGAT | 47 | AX | 450 |
| | 14863 | 14878 | | | | | | |
| | 15153 | 15168 | | | | | | |
| | 15226 | 15241 | | | | | | |
| 1299685 | 20582 | 20597 | N/A | N/A | ACCAGAGAGCTCCGGA | 41 | AX | 611 |
| | 20708 | 20723 | | | | | | |
| | 20750 | 20765 | | | | | | |
| | 20918 | 20933 | | | | | | |
| 1299727 | 25163 | 25178 | N/A | N/A | ACGACCTATAAGGACC | 47 | AX | 2657 |
| 1299733 | 23535 | 23550 | N/A | N/A | TCCTCTCCTAGTGTAG | 95 | AX | 2724 |
| 1299741 | 23004 | 23019 | 3279 | 3294 | CTGATGCAAGATCCTG | 58 | AX | 2277 |
| 1299757 | 17703 | 17718 | N/A | N/A | ACTCTCATCTATGAAC | 65 | AX | 2725 |
| 1299804 | 19880 | 19895 | N/A | N/A | GATTAGTTTCCCCGTC | 25 | AX | 1610 |
| 1299853 | 22900 | 22915 | N/A | N/A | GACAAGGAAGCACCCG | 49 | AX | 2076 |
| 1299862 | 5140 | 5155 | 92 | 107 | CGATGCCATCTTGACC | 48 | AX | 2177 |
| 1299867 | 26779 | 26794 | N/A | N/A | TCGATAGATCTACACA | 56 | AX | 2617 |
| 1299917 | 31020 | 31035 | 3464 | 3479 | ATTAGTGCTGAGTACC | 61 | AX | 1203 |
| 1299928 | 25814 | 25829 | N/A | N/A | TACACCAAGCATGTGT | 80 | AX | 2607 |
| 1299936 | 26598 | 26613 | N/A | N/A | TTTGGTGATACGGTTA | 48 | AX | 2726 |
| 1232737 | 5138 | 5153 | 90 | 105 | ATGCCATCTTGACCCA | 69 | AY | 22 |
| 1299547 | 11001 | 11016 | 1304 | 1319 | GCCGATGGCCAGAAGC | 41 | AY | 2621 |
| 1299567 | 11260 | 11275 | 1563 | 1578 | TCATGATCAGGTCCCC | 47 | AY | 2034 |
| 1299608 | 12465 | 12480 | 2768 | 2783 | CAGTGACTCCACCCGA | 39 | AY | 2350 |
| 1299624 | 5168 | 5183 | 120 | 135 | TTACAGTTTACGGTGA | 53 | AY | 24 |
| 1299625 | 14476 | 14491 | N/A | N/A | TGAGCCTCCTACCGGG | 52 | AY | 2142 |
| | 14622 | 14637 | | | | | | |
| | 14768 | 14783 | | | | | | |
| | 14914 | 14929 | | | | | | |
| | 15060 | 15075 | | | | | | |
| 1299641 | 5288 | 5303 | 240 | 255 | GCCAAATGCTTACCAG | 52 | AY | 333 |
| 1299661 | 16643 | 16658 | 2961 | 2976 | TTAGACTCTGGCTGGT | 59 | AY | 2608 |
| 1299665 | 17665 | 17680 | N/A | N/A | ATATCGAGCATCATGG | 60 | AY | 375 |
| 1299755 | 12135 | 12150 | 2438 | 2453 | TTCGAATTTGCCATAG | 51 | AY | 189 |
| 1299793 | 19270 | 19285 | N/A | N/A | TAGACACTAGAGCCTC | 48 | AY | 2658 |
| 1299794 | 12142 | 12157 | 2445 | 2460 | ACCCCTTTTCGAATTT | 62 | AY | 2269 |
| 1299814 | 12449 | 12464 | 2752 | 2767 | TGACAGTTCTCAATGC | 73 | AY | 2727 |
| 1299818 | 5139 | 5154 | 91 | 106 | GATGCCATCTTGACCC | 83 | AY | 2100 |
| 1299821 | 20426 | 20441 | N/A | N/A | GGTTTGTAAGTGAAGC | 59 | AY | 2659 |
| 1299829 | 12456 | 12471 | 2759 | 2774 | CACCCGATGACAGTTC | 48 | AY | 345 |
| 1299843 | 20701 | 20716 | N/A | N/A | AGCTCCGGAATAGAGA | 91 | AY | 612 |
| | 20743 | 20758 | | | | | | |
| | 20911 | 20926 | | | | | | |
| | 20995 | 21010 | | | | | | |
| 1299844 | 22430 | 22445 | N/A | N/A | CATAATGTCCCCGAGG | 65 | AY | 2632 |
| 1299886 | 27027 | 27042 | N/A | N/A | CCATAGGCTATACCTA | 61 | AY | 470 |
| | 27063 | 27078 | | | | | | |
| 1299908 | 31012 | 31027 | 3456 | 3471 | TGAGTACCGAGGACAA | 43 | AY | 2358 |
| 1299926 | 25746 | 25761 | N/A | N/A | TGTTGAAATTGAGAGG | 44 | AY | 2728 |
| 1299933 | 31082 | 31097 | 3526 | 3541 | AGTAGTTTGATCCCCT | 56 | AY | 1974 |
| 1232737 | 5138 | 5153 | 90 | 105 | ATGCCATCTTGACCCA | 63 | AZ | 22 |
| 1299507 | 27130 | 27145 | N/A | N/A | AGCTATACCTAACACA | 67 | AZ | 2239 |
| 1299509 | 27198 | 27213 | N/A | N/A | GTATTGAGACAGGCAG | 42 | AZ | 854 |
| 1299516 | 27366 | 27381 | N/A | N/A | GCATTTAGGACCGTCC | 58 | AZ | 241 |
| 1299524 | 27204 | 27219 | N/A | N/A | TGAGCAGTATTGAGAC | 74 | AZ | 2729 |
| 1299528 | 6019 | 6034 | 971 | 986 | CCTGTTGATCGCAGCG | 52 | AZ | 2260 |
| 1299536 | 10305 | 10320 | 1105 | 1120 | GAAAGGTACTCCAGTA | 48 | AZ | 338 |
| 1299544 | 10295 | 10310 | 1095 | 1110 | CCAGTAAACCCATCCA | 48 | AZ | 1723 |
| 1299559 | 11008 | 11023 | 1311 | 1326 | TGGTCTTGCCGATGGC | 35 | AZ | 2033 |
| 1299587 | 11973 | 11988 | 2276 | 2291 | CTCGCAGTCCACTTCC | 86 | AZ | 868 |
| 1299637 | 14577 | 14592 | N/A | N/A | GGCAGGTGCCATCTAG | 72 | AZ | 1759 |
| | 14869 | 14884 | | | | | | |
| | 15159 | 15174 | | | | | | |
| | 15232 | 15247 | | | | | | |
| 1299644 | 14575 | 14590 | N/A | N/A | CAGGTGCCATCTAGAG | 31 | AZ | 1605 |
| | 14867 | 14882 | | | | | | |
| | 15157 | 15172 | | | | | | |
| | 15230 | 15245 | | | | | | |
| 1299645 | 16642 | 16657 | 2960 | 2975 | TAGACTCTGGCTGGTG | 43 | AZ | 2730 |
| 1299668 | 17664 | 17679 | N/A | N/A | TATCGAGCATCATGGT | 71 | AZ | 2487 |
| 1299699 | 23282 | 23297 | N/A | N/A | ATTATATGCCTCCAGT | 62 | AZ | 2626 |
| 1299703 | 21599 | 21614 | N/A | N/A | TACAATATGAGGACCC | 41 | AZ | 228 |
| 1299704 | 11042 | 11057 | 1345 | 1360 | ATCTTAATGGGACTCA | 65 | AZ | 340 |
| 1299777 | 18857 | 18872 | N/A | N/A | GTGCAGTAACATATCC | 66 | AZ | 2489 |
| 1299781 | 12141 | 12156 | 2444 | 2459 | CCCCTTTTCGAATTTG | 44 | AZ | 574 |
| 1299784 | 18756 | 18771 | N/A | N/A | ATTTAAGCCACCGAAC | 95 | AZ | 2646 |
| 1299806 | 20420 | 20435 | N/A | N/A | TAAGTGAAGCGGGCGG | 52 | AZ | 2630 |
| 1299808 | 20277 | 20292 | N/A | N/A | TTTGACGATTTCATCC | 53 | AZ | 2731 |
| 1299832 | 20593 | 20608 | N/A | N/A | GAATACACCTGACCAG | 139 | AZ | 227 |
| 1299837 | 22899 | 22914 | N/A | N/A | ACAAGGAAGCACCCGT | 72 | AZ | 1999 |
| 1299847 | 23823 | 23838 | N/A | N/A | CATGATTATTAGTGGG | 62 | AZ | 78 |
| 1299887 | 27025 | 27040 | N/A | N/A | ATAGGCTATACCTAAC | 65 | AZ | 316 |
| | 27061 | 27076 | | | | | | |
| | 27097 | 27112 | | | | | | |
| | 27115 | 27130 | | | | | | |
| 1299897 | 28757 | 28772 | N/A | N/A | TATTAAGCAACGGTTA | 71 | AZ | 1549 |
| 1299922 | 31019 | 31034 | 3463 | 3478 | TTAGTGCTGAGTACCG | 58 | AZ | 1126 |
| 1299944 | 26596 | 26611 | N/A | N/A | TGGTGATACGGTTACT | 30 | AZ | 2496 |

### Example 3: Effect of Mixed MOE and cEt, Uniform Phosphorothioate Modified Oligonucleotides on Human NLRP3 RNA In Vitro, Single Dose

[0335] Modified oligonucleotides complementary to human NLRP3 nucleic acid were designed and tested for their single dose effects on NLRP3 RNA in vitro. The modified oligonucleotides were tested in a series of experiments that had the same culture conditions.

[0336] The modified oligonucleotides in the table below are 16 nucleosides in length, wherein the sugar motif for the modified oligonucleotides is (from 5′ to 3′): kkdddddddddkekek; wherein each “d” represents a 2′-β-D-deoxyribosyl sugar moiety, each “e” represents a 2′-MOE sugar moiety, and each “k” represents a cEt sugar moiety. The internucleoside linkage motif for the modified oligonucleotides is (from 5′ to 3′): sssssssssssssss; wherein each “s” represents a phosphorothioate internucleoside linkage. Each cytosine residue is a 5-methyl cytosine.

[0337] “Start site” indicates the 5′-most nucleoside to which the modified oligonucleotide is complementary in the target nucleic acid sequence. “Stop site” indicates the 3′-most nucleoside to which the modified oligonucleotide is complementary in the target nucleic acid sequence. Each modified oligonucleotide listed in the tables below is 100% complementary to SEQ ID NO: 1 (described herein above), to SEQ ID NO: 2 (described herein above), or to both. “N/A” indicates that the modified oligonucleotide is not 100% complementary to that particular target nucleic acid sequence.

[0338] Cultured THP-1 cells were treated with modified oligonucleotide at a concentration of 2000 nM by electroporation at a density of 300,000 cells per well. After a treatment period of approximately 24 hours, total RNA was isolated from the cells and NLRP3 RNA levels were measured by quantitative real-time RTPCR. NLRP3 RNA levels were measured by human primer-probe set RTS37509 (described herein above). NLRP3 RNA levels were normalized to total RNA content, as measured by RIBOGREEN®. Reduction of NLRP3 RNA is presented in the tables below as percent NLRP3 RNA relative to the amount of NLRP3 RNA in untreated control cells (% UTC).

[0339] Each separate experimental analysis described in this example is identified by a letter ID in the table column below labeled “AID” (Analysis ID). In the table below, Compound No. 1232737 (described herein above) was used as a benchmark on multiple plates.

TABLE 5
Reduction of NLRP3 RNA by modified oligonucleotides with a mixed MOE/cEt sugar motif
and uniform phosphorothioate internucleoside linkages at a concentration of 2000 nM
in THP-1 cells

| | SEQ | SEQ | SEQ | SEQ | | | | |
|---|---|---|---|---|---|---|---|---|
| | ID | ID | ID | ID | | | | |
| | No: 1 | No: 1 | No: 2 | No: 2 | | NLRP3 | | |
| Compound | Start | Stop | Start | Stop | | (% | | SEQ ID |
| Number | Site | Site | Site | Site | Sequence (5′ to 3′) | UTC) | AID | NO |
| 1232737 | 5138 | 5153 | 90 | 105 | ATGCCATCTTGACCCA | 60 | AH | 22 |
| 1300733 | 27366 | 27381 | N/A | N/A | GCATTTAGGACCGTCC | 61 | AH | 241 |
| 1300739 | 27204 | 27219 | N/A | N/A | TGAGCAGTATTGAGAC | 60 | AH | 2729 |
| 1300749 | 6018 | 6033 | 970 | 985 | CTGTTGATCGCAGCGA | 70 | AH | 2183 |
| 1300754 | 10303 | 10318 | 1103 | 1118 | AAGGTACTCCAGTAAA | 87 | AH | 2516 |
| 1300781 | 11007 | 11022 | 1310 | 1325 | GGTCTTGCCGATGGCC | 91 | AH | 2675 |
| 1300808 | 11972 | 11987 | 2275 | 2290 | TCGCAGTCCACTTCCT | 68 | AH | 2668 |
| 1300873 | 16642 | 16657 | 2960 | 2975 | TAGACTCTGGCTGGTG | 56 | AH | 2730 |
| 1300883 | 15183 | 15198 | N/A | N/A | CGTCAGAGTCTGTCCT | 25 | AH | 2656 |
| 1300912 | 20583 | 20598 | N/A | N/A | GACCAGAGAGCTCCGG | 55 | AH | 73 |
| | 20709 | 20724 | | | | | | |
| | 20751 | 20766 | | | | | | |
| | 20919 | 20934 | | | | | | |
| 1300914 | 21598 | 21613 | N/A | N/A | ACAATATGAGGACCCA | 51 | AH | 2383 |
| 1300954 | 11048 | 11063 | 1351 | 1366 | AACTCCATCTTAATGG | 62 | AH | 2110 |
| 1300959 | 23002 | 23017 | 3277 | 3292 | GATGCAAGATCCTGAC | 52 | AH | 2123 |
| 1300968 | 12134 | 12149 | 2437 | 2452 | TCGAATTTGCCATAGT | 39 | AH | 2115 |
| 1301007 | 19270 | 19285 | N/A | N/A | TAGACACTAGAGCCTC | 62 | AH | 2658 |
| 1301030 | 20276 | 20291 | N/A | N/A | TTGACGATTTCATCCC | 54 | AH | 2672 |
| 1301045 | 12455 | 12470 | 2758 | 2773 | ACCCGATGACAGTTCT | 80 | AH | 2195 |
| 1301069 | 23823 | 23838 | N/A | N/A | CATGATTATTAGTGGG | 96 | AH | 78 |
| 1301145 | 25745 | 25760 | N/A | N/A | GTTGAAATTGAGAGGT | 33 | AH | 1235 |
| 1301146 | 35776 | 35791 | 4129 | 4144 | GAGCTAATTACATGAG | 58 | AH | 824 |
| 1301163 | 26603 | 26618 | N/A | N/A | CCTTATTTGGTGATAC | 53 | AH | 1314 |
| 1232737 | 5138 | 5153 | 90 | 105 | ATGCCATCTTGACCCA | 54 | AI | 22 |
| 1300728 | 27195 | 27210 | N/A | N/A | TTGAGACAGGCAGTAC | 62 | AI | 2383 |
| 1300737 | 27365 | 27380 | N/A | N/A | CATTTAGGACCGTCCC | 74 | AI | 2110 |
| 1300786 | 11258 | 11273 | 1561 | 1576 | ATGATCAGGTCCCCCA | 65 | AI | 2123 |
| 1300824 | 5166 | 5181 | 118 | 133 | ACAGTTTACGGTGAAC | 51 | AI | 2115 |
| 1300831 | 12276 | 12291 | 2579 | 2594 | GGCTTTCACTTCAATC | 36 | AI | 2658 |
| 1300865 | 16737 | 16752 | 3055 | 3070 | AATCTCCGAATGTTAC | 60 | AI | 2672 |
| 1300885 | 17664 | 17679 | N/A | N/A | TATCGAGCATCATGGT | 38 | AI | 2195 |
| 1300899 | 17670 | 17685 | N/A | N/A | GGAATATATCGAGCAT | 23 | AI | 78 |
| 1300909 | 11041 | 11056 | 1344 | 1359 | TCTTAATGGGACTCAC | 43 | AI | 1235 |
| 1300921 | 23281 | 23296 | N/A | N/A | TTATATGCCTCCAGTC | 49 | AI | 824 |
| 1300932 | 5137 | 5152 | 89 | 104 | TGCCATCTTGACCCAT | 83 | AI | 1314 |
| 1300933 | 23533 | 23548 | N/A | N/A | CTCTCCTAGTGTAGAG | 99 | AI | 2488 |
| 1300960 | 23000 | 23015 | 3275 | 3290 | TGCAAGATCCTGACAA | 72 | AI | 2046 |
| 1300980 | 17697 | 17712 | N/A | N/A | ATCTATGAACATGGCC | 64 | AI | 1839 |
| 1300999 | 18755 | 18770 | N/A | N/A | TTTAAGCCACCGAACA | 85 | AI | 2509 |
| 1301022 | 19878 | 19893 | N/A | N/A | TTAGTTTCCCCGTCAC | 40 | AI | 2679 |
| 1301081 | 24554 | 24569 | N/A | N/A | AGTCAAATTGCCAAGG | 58 | AI | 2521 |
| 1301093 | 26784 | 26799 | N/A | N/A | CCCAATCGATAGATCT | 73 | AI | 468 |
| 1301098 | 14504 | 14519 | N/A | N/A | GGAAGGTGCTATCTAG | 40 | AI | 1835 |
| | 14650 | 14665 | | | | | | |
| | 14723 | 14738 | | | | | | |
| | 14796 | 14811 | | | | | | |
| | 14942 | 14957 | | | | | | |
| | 15015 | 15030 | | | | | | |
| | 15088 | 15103 | | | | | | |
| 1301117 | 28755 | 28770 | N/A | N/A | TTAAGCAACGGTTACA | 65 | AI | 1472 |
| 1301124 | 28762 | 28777 | N/A | N/A | GTAACTATTAAGCAAC | 79 | AI | 1626 |
| 1301126 | 29463 | 29478 | N/A | N/A | GAGTCAAATTAAGCCC | 57 | AI | 2495 |
| 1301137 | 31018 | 31033 | 3462 | 3477 | TAGTGCTGAGTACCGA | 46 | AI | 1049 |
| 1301143 | 31081 | 31096 | 3525 | 3540 | GTAGTTTGATCCCCTT | 59 | AI | 1897 |
| 1301157 | 26602 | 26617 | N/A | N/A | CTTATTTGGTGATACG | 57 | AI | 1237 |
| 1232737 | 5138 | 5153 | 90 | 105 | ATGCCATCTTGACCCA | 77 | AJ | 22 |
| 1300714 | 26962 | 26977 | N/A | N/A | TCTCGACTGATTAATG | 73 | AJ | 2667 |
| 1300715 | 27094 | 27109 | N/A | N/A | GGCTATACCTAACACG | 65 | AJ | 2515 |
| 1300742 | 27202 | 27217 | N/A | N/A | AGCAGTATTGAGACAG | 57 | AJ | 2497 |
| 1300812 | 11301 | 11316 | 1604 | 1619 | CACGATCTTGTGGATG | 57 | AJ | 726 |
| 1300825 | 12463 | 12478 | 2766 | 2781 | GTGACTCCACCCGATG | 42 | AJ | 2272 |
| 1300829 | 12275 | 12290 | 2578 | 2593 | GCTTTCACTTCAATCC | 53 | AJ | 1347 |
| 1300837 | 12491 | 12506 | 2794 | 2809 | GGCATGTTATGGAGAA | 45 | AJ | 1118 |
| 1300854 | 14679 | 14694 | N/A | N/A | GCTCCAATCAGAGTCT | 55 | AJ | 2068 |
| | 14825 | 14840 | | | | | | |
| | 14971 | 14986 | | | | | | |
| 1300863 | 16727 | 16742 | 3045 | 3060 | TGTTACAGCCAGGATG | 67 | AJ | 2669 |
| 1300874 | 15115 | 15130 | N/A | N/A | GTTCCAGTCAGAGTCT | 38 | AJ | 2681 |
| 1300887 | 17663 | 17678 | N/A | N/A | ATCGAGCATCATGGTT | 44 | AJ | 2517 |
| 1300908 | 21597 | 21612 | N/A | N/A | CAATATGAGGACCCAG | 58 | AJ | 2305 |
| 1300934 | 23500 | 23515 | N/A | N/A | CTTTCCTAGTGTAGAG | 54 | AJ | 2518 |
| 1300948 | 25162 | 25177 | N/A | N/A | CGACCTATAAGGACCC | 51 | AJ | 2502 |
| 1300972 | 23038 | 23053 | 3313 | 3328 | TAGAGTCTGGTCAGGG | 67 | AJ | 1893 |
| 1300977 | 17448 | 17463 | N/A | N/A | CTAGATTAACATTAGG | 44 | AJ | 915 |
| 1300996 | 18856 | 18871 | N/A | N/A | TGCAGTAACATATCCA | 58 | AJ | 1532 |
| 1301009 | 19269 | 19284 | N/A | N/A | AGACACTAGAGCCTCA | 73 | AJ | 2504 |
| 1301028 | 20419 | 20434 | N/A | N/A | AAGTGAAGCGGGCGGT | 90 | AJ | 2490 |
| 1301041 | 20424 | 20439 | N/A | N/A | TTTGTAAGTGAAGCGG | 38 | AJ | 2491 |
| 1301068 | 23822 | 23837 | N/A | N/A | ATGATTATTAGTGGGT | 90 | AJ | 2463 |
| 1301085 | 25034 | 25049 | N/A | N/A | TAGGTATTGACAATAG | 30 | AJ | 2494 |
| 1301092 | 14501 | 14516 | N/A | N/A | AGGTGCTATCTAGAGA | 18 | AJ | 1681 |
| | 14647 | 14662 | | | | | | |
| | 14720 | 14735 | | | | | | |
| | 14793 | 14808 | | | | | | |
| | 14939 | 14954 | | | | | | |
| | 15012 | 15027 | | | | | | |
| | 15085 | 15100 | | | | | | |
| 1232737 | 5138 | 5153 | 90 | 105 | ATGCCATCTTGACCCA | 64 | AK | 22 |
| 1300746 | 6017 | 6032 | 969 | 984 | TGTTGATCGCAGCGAA | 67 | AK | 2106 |
| 1300750 | 27371 | 27386 | N/A | N/A | GCAGAGCATTTAGGAC | 61 | AK | 2506 |
| 1300753 | 6025 | 6040 | 977 | 992 | GTCTCTCCTGTTGATC | 48 | AK | 2674 |
| 1300766 | 5146 | 5161 | 98 | 113 | ACTTCACGATGCCATC | 55 | AK | 715 |
| 1300769 | 10927 | 10942 | 1230 | 1245 | GTTTGTTGAGGCTCAC | 48 | AK | 2680 |
| 1300864 | 16641 | 16656 | 2959 | 2974 | AGACTCTGGCTGGTGC | 66 | AK | 2670 |
| 1300898 | 17669 | 17684 | N/A | N/A | GAATATATCGAGCATC | 33 | AK | 68 |
| 1300922 | 23280 | 23295 | N/A | N/A | TATATGCCTCCAGTCC | 52 | AK | 2537 |
| 1300930 | 23305 | 23320 | N/A | N/A | TTATCTTATTAGCAGC | 50 | AK | 922 |
| 1300938 | 11046 | 11061 | 1349 | 1364 | CTCCATCTTAATGGGA | 81 | AK | 2528 |
| 1300984 | 12140 | 12155 | 2443 | 2458 | CCCTTTTCGAATTTGC | 25 | AK | 497 |
| 1301048 | 20592 | 20607 | N/A | N/A | AATACACCTGACCAGA | 72 | AK | 1457 |
| 1301049 | 12454 | 12469 | 2757 | 2772 | CCCGATGACAGTTCTC | 54 | AK | 268 |
| 1301054 | 22898 | 22913 | N/A | N/A | CAAGGAAGCACCCGTA | 62 | AK | 2492 |
| 1301088 | 25077 | 25092 | N/A | N/A | GCCGCTCTGTTTGTGA | 55 | AK | 2677 |
| 1301091 | 25074 | 25089 | N/A | N/A | GCTCTGTTTGTGATAC | 39 | AK | 2389 |
| | 26262 | 26277 | | | | | | |
| 1301136 | 31080 | 31095 | 3524 | 3539 | TAGTTTGATCCCCTTG | 52 | AK | 1820 |
| 1301149 | 35773 | 35788 | 4126 | 4141 | CTAATTACATGAGGTC | 35 | AK | 2364 |
| 1301156 | 5247 | 5262 | 199 | 214 | GGAGTGTGTCCTGAGC | 47 | AK | 2255 |
| 1232737 | 5138 | 5153 | 90 | 105 | ATGCCATCTTGACCCA | 63 | AL | 22 |
| 1300761 | 10302 | 10317 | 1102 | 1117 | AGGTACTCCAGTAAAC | 61 | AL | 2689 |
| 1300782 | 11006 | 11021 | 1309 | 1324 | GTCTTGCCGATGGCCA | 71 | AL | 1956 |
| 1300797 | 11264 | 11279 | 1567 | 1582 | CAGCTCATGATCAGGT | 26 | AL | 2676 |
| 1300820 | 11978 | 11993 | 2281 | 2296 | AACTTCTCGCAGTCCA | 54 | AL | 1037 |
| 1300855 | 14577 | 14592 | N/A | N/A | GGCAGGTGCCATCTAG | 85 | AL | 1759 |
| | 14869 | 14884 | | | | | | |
| | 15159 | 15174 | | | | | | |
| | 15232 | 15247 | | | | | | |
| 1300867 | 16735 | 16750 | 3053 | 3068 | TCTCCGAATGTTACAG | 53 | AL | 117 |
| 1300877 | 16647 | 16662 | 2965 | 2980 | TCAGTTAGACTCTGGC | 49 | AL | 150 |
| 1300882 | 5136 | 5151 | 88 | 103 | GCCATCTTGACCCATC | 63 | AL | 2678 |
| 1300903 | 11040 | 11055 | 1343 | 1358 | CTTAATGGGACTCACG | 69 | AL | 186 |
| 1300925 | 23494 | 23509 | N/A | N/A | TAGTGTAGAGGCTGCA | 37 | AL | 538 |
| | 23527 | 23542 | | | | | | |
| 1300952 | 25161 | 25176 | N/A | N/A | GACCTATAAGGACCCA | 50 | AL | 81 |
| 1300955 | 12133 | 12148 | 2436 | 2451 | CGAATTTGCCATAGTT | 39 | AL | 2423 |
| 1300963 | 23035 | 23050 | 3310 | 3325 | AGTCTGGTCAGGGAAT | 77 | AL | 2686 |
| 1300978 | 17696 | 17711 | N/A | N/A | TCTATGAACATGGCCC | 78 | AL | 2556 |
| 1300987 | 12139 | 12154 | 2442 | 2457 | CCTTTTCGAATTTGCC | 29 | AL | 420 |
| 1301000 | 18760 | 18775 | N/A | N/A | AAGCATTTAAGCCACC | 54 | AL | 1301 |
| 1301064 | 23821 | 23836 | N/A | N/A | TGATTATTAGTGGGTA | 71 | AL | 2078 |
| 1301095 | 26783 | 26798 | N/A | N/A | CCAATCGATAGATCTA | 85 | AL | 2541 |
| 1301120 | 27099 | 27114 | N/A | N/A | ACATAGGCTATACCTA | 87 | AL | 394 |
| | 27117 | 27132 | | | | | | |
| 1301131 | 29462 | 29477 | N/A | N/A | AGTCAAATTAAGCCCA | 107 | AL | 245 |
| 1301138 | 31017 | 31032 | 3461 | 3476 | AGTGCTGAGTACCGAG | 54 | AL | 972 |
| 1301147 | 25740 | 25755 | N/A | N/A | AATTGAGAGGTATATG | 111 | AL | 2543 |
| 1232737 | 5138 | 5153 | 90 | 105 | ATGCCATCTTGACCCA | 75 | AM | 22 |
| 1300717 | 26961 | 26976 | N/A | N/A | CTCGACTGATTAATGC | 45 | AM | 2544 |
| 1300732 | 27106 | 27121 | N/A | N/A | ACCTAACACATAGGCT | 45 | AM | 2085 |
| | 27124 | 27139 | | | | | | |
| 1300740 | 27364 | 27379 | N/A | N/A | ATTTAGGACCGTCCCC | 82 | AM | 87 |
| 1300793 | 11300 | 11315 | 1603 | 1618 | ACGATCTTGTGGATGG | 54 | AM | 649 |
| 1300807 | 11955 | 11970 | 2258 | 2273 | TTGGAACAGGTTCATC | 49 | AM | 2545 |
| 1300819 | 11977 | 11992 | 2280 | 2295 | ACTTCTCGCAGTCCAC | 57 | AM | 960 |
| 1300821 | 5153 | 5168 | 105 | 120 | AACAACCACTTCACGA | 93 | AM | 2546 |
| 1300826 | 12462 | 12477 | 2765 | 2780 | TGACTCCACCCGATGA | 71 | AM | 2692 |
| 1300838 | 12487 | 12502 | 2790 | 2805 | TGTTATGGAGAAACCC | 75 | AM | 576 |
| 1300851 | 12709 | 12724 | N/A | N/A | GGCATTATGATGTAGC | 46 | AM | 832 |
| 1300856 | 14680 | 14695 | N/A | N/A | GGCTCCAATCAGAGTC | 96 | AM | 2453 |
| | 14826 | 14841 | | | | | | |
| | 14972 | 14987 | | | | | | |
| 1300937 | 23532 | 23547 | N/A | N/A | TCTCCTAGTGTAGAGG | 63 | AM | 2549 |
| 1300974 | 17447 | 17462 | N/A | N/A | TAGATTAACATTAGGT | 26 | AM | 838 |
| 1300992 | 17992 | 18007 | N/A | N/A | TCAACCCATACAAAGC | 100 | AM | 2519 |
| 1301014 | 12145 | 12160 | 2448 | 2463 | AATACCCCTTTTCGAA | 99 | AM | 36 |
| 1301026 | 20275 | 20290 | N/A | N/A | TGACGATTTCATCCCA | 69 | AM | 2512 |
| 1301079 | 24553 | 24568 | N/A | N/A | GTCAAATTGCCAAGGA | 84 | AM | 1003 |
| 1301086 | 25076 | 25091 | N/A | N/A | CCGCTCTGTTTGTGAT | 88 | AM | 2683 |
| 1301111 | 26973 | 26988 | N/A | N/A | ATGCATAAAAGTCTCG | 73 | AM | 85 |
| 1301113 | 27107 | 27122 | N/A | N/A | TACCTAACACATAGGC | 27 | AM | 2470 |
| | 27125 | 27140 | | | | | | |
| 1301114 | 28761 | 28776 | N/A | N/A | TAACTATTAAGCAACG | 73 | AM | 90 |
| 1301139 | 31079 | 31094 | 3523 | 3538 | AGTTTGATCCCCTTGT | 75 | AM | 1743 |
| 1232737 | 5138 | 5153 | 90 | 105 | ATGCCATCTTGACCCA | 87 | AN | 22 |
| 1300725 | 27100 | 27115 | N/A | N/A | CACATAGGCTATACCT | 81 | AN | 1623 |
| | 27118 | 27133 | | | | | | |
| 1300726 | 27134 | 27149 | N/A | N/A | ATGTAGCTATACCTAA | 104 | AN | 2551 |
| 1300772 | 5145 | 5160 | 97 | 112 | CTTCACGATGCCATCT | 57 | AN | 253 |
| 1300832 | 11983 | 11998 | 2286 | 2301 | TGTAGAACTTCTCGCA | 62 | AN | 2685 |
| 1300901 | 17668 | 17683 | N/A | N/A | AATATATCGAGCATCA | 58 | AN | 606 |
| 1300927 | 23303 | 23318 | N/A | N/A | ATCTTATTAGCAGCAG | 56 | AN | 76 |
| 1300939 | 23499 | 23514 | N/A | N/A | TTTCCTAGTGTAGAGG | 55 | AN | 2554 |
| 1301012 | 19268 | 19283 | N/A | N/A | GACACTAGAGCCTCAG | 81 | AN | 1686 |
| 1301017 | 19883 | 19898 | N/A | N/A | CTTGATTAGTTTCCCC | 94 | AN | 1764 |
| 1301021 | 19877 | 19892 | N/A | N/A | TAGTTTCCCCGTCACA | 62 | AN | 2538 |
| 1301023 | 20418 | 20433 | N/A | N/A | AGTGAAGCGGGCGGTG | 106 | AN | 2530 |
| 1301050 | 12453 | 12468 | 2756 | 2771 | CCGATGACAGTTCTCA | 52 | AN | 2118 |
| 1301060 | 22427 | 22442 | N/A | N/A | AATGTCCCCGAGGCTC | 89 | AN | 2687 |
| 1301075 | 25032 | 25047 | N/A | N/A | GGTATTGACAATAGTA | 16 | AN | 2682 |
| 1301112 | 27021 | 27036 | N/A | N/A | GCTATACCTAACACAC | 63 | AN | 2598 |
| | 27057 | 27072 | | | | | | |
| 1301141 | 31016 | 31031 | 3460 | 3475 | GTGCTGAGTACCGAGG | 46 | AN | 895 |
| 1301148 | 35770 | 35785 | 4123 | 4138 | ATTACATGAGGTCACC | 99 | AN | 2567 |
| 1301155 | 26601 | 26616 | N/A | N/A | TTATTTGGTGATACGG | 46 | AN | 1160 |
| 1301162 | 25820 | 25835 | N/A | N/A | TATGTTTACACCAAGC | 22 | AN | 2522 |
| 1232737 | 5138 | 5153 | 90 | 105 | ATGCCATCTTGACCCA | 55 | AO | 22 |
| 1300738 | 27201 | 27216 | N/A | N/A | GCAGTATTGAGACAGG | 50 | AO | 931 |
| 1300751 | 27370 | 27385 | N/A | N/A | CAGAGCATTTAGGACC | 71 | AO | 2525 |
| 1300757 | 6023 | 6038 | 975 | 990 | CTCTCCTGTTGATCGC | 40 | AO | 798 |
| 1300768 | 10925 | 10940 | 1228 | 1243 | TTGTTGAGGCTCACAC | 46 | AO | 2684 |
| 1300776 | 11005 | 11020 | 1308 | 1323 | TCTTGCCGATGGCCAG | 65 | AO | 2691 |
| 1300783 | 11013 | 11028 | 1316 | 1331 | CGTCTTGGTCTTGCCG | 59 | AO | 2690 |
| 1300847 | 5172 | 5187 | 124 | 139 | TGTATTACAGTTTACG | 41 | AO | 255 |
| 1300857 | 14678 | 14693 | N/A | N/A | CTCCAATCAGAGTCTG | 47 | AO | 1991 |
| | 14824 | 14839 | | | | | | |
| | 14970 | 14985 | | | | | | |
| 1300907 | 21596 | 21611 | N/A | N/A | AATATGAGGACCCAGG | 70 | AO | 151 |
| 1300916 | 21604 | 21619 | N/A | N/A | TCTTATACAATATGAG | 71 | AO | 305 |
| 1300928 | 11045 | 11060 | 1348 | 1363 | TCCATCTTAATGGGAC | 127 | AO | 2693 |
| 1300981 | 17446 | 17461 | N/A | N/A | AGATTAACATTAGGTC | 18 | AO | 761 |
| 1300986 | 18753 | 18768 | N/A | N/A | TAAGCCACCGAACAGC | 77 | AO | 2563 |
| 1301024 | 20274 | 20289 | N/A | N/A | GACGATTTCATCCCAG | 35 | AO | 1918 |
| 1301036 | 20591 | 20606 | N/A | N/A | ATACACCTGACCAGAG | 72 | AO | 2531 |
| 1301039 | 20423 | 20438 | N/A | N/A | TTGTAAGTGAAGCGGG | 78 | AO | 2550 |
| 1301055 | 22897 | 22912 | N/A | N/A | AAGGAAGCACCCGTAC | 57 | AO | 2539 |
| 1301066 | 22902 | 22917 | N/A | N/A | TGGACAAGGAAGCACC | 53 | AO | 2565 |
| 1301074 | 14500 | 14515 | N/A | N/A | GGTGCTATCTAGAGAA | 19 | AO | 1604 |
| | 14646 | 14661 | | | | | | |
| | 14719 | 14734 | | | | | | |
| | 14792 | 14807 | | | | | | |
| | 14938 | 14953 | | | | | | |
| | 15011 | 15026 | | | | | | |
| | 15084 | 15099 | | | | | | |
| 1301077 | 25020 | 25035 | N/A | N/A | AGTAACTACATAGAGC | 48 | AO | 465 |
| 1301080 | 23827 | 23842 | N/A | N/A | AGTGCATGATTATTAG | 77 | AO | 2698 |
| 1301094 | 26789 | 26804 | N/A | N/A | TATGCCCCAATCGATA | 63 | AO | 2688 |
| 1301128 | 29461 | 29476 | N/A | N/A | GTCAAATTAAGCCCAT | 62 | AO | 168 |
| 1232737 | 5138 | 5153 | 90 | 105 | ATGCCATCTTGACCCA | 65 | AP | 22 |
| 1300721 | 5133 | 5148 | 85 | 100 | ATCTTGACCCATCAGC | 66 | AP | 21 |
| 1300724 | 6015 | 6030 | 967 | 982 | TTGATCGCAGCGAAGA | 68 | AP | 2029 |
| 1300756 | 6022 | 6037 | 974 | 989 | TCTCCTGTTGATCGCA | 83 | AP | 721 |
| 1300770 | 10923 | 10938 | 1226 | 1241 | GTTGAGGCTCACACTC | 64 | AP | 1340 |
| 1300787 | 11235 | 11250 | 1538 | 1553 | CTGTGTCACAAGGCTC | 46 | AP | 1572 |
| 1300796 | 11299 | 11314 | 1602 | 1617 | CGATCTTGTGGATGGG | 52 | AP | 2343 |
| 1300801 | 11263 | 11278 | 1566 | 1581 | AGCTCATGATCAGGTC | 44 | AP | 2535 |
| 1300809 | 11952 | 11967 | 2255 | 2270 | GAACAGGTTCATCCTC | 66 | AP | 34 |
| 1300817 | 11976 | 11991 | 2279 | 2294 | CTTCTCGCAGTCCACT | 76 | AP | 2704 |
| 1300850 | 14478 | 14493 | N/A | N/A | GCTGAGCCTCCTACCG | 45 | AP | 2296 |
| | 14624 | 14639 | | | | | | |
| | 14770 | 14785 | | | | | | |
| | 14916 | 14931 | | | | | | |
| | 15062 | 15077 | | | | | | |
| 1300858 | 14580 | 14595 | N/A | N/A | TAAGGCAGGTGCCATC | 66 | AP | 1913 |
| | 14872 | 14887 | | | | | | |
| | 15162 | 15177 | | | | | | |
| | 15235 | 15250 | | | | | | |
| 1300866 | 16734 | 16749 | 3052 | 3067 | CTCCGAATGTTACAGC | 96 | AP | 40 |
| 1300878 | 16645 | 16660 | 2963 | 2978 | AGTTAGACTCTGGCTG | 83 | AP | 1351 |
| 1300890 | 15187 | 15202 | N/A | N/A | CTCCCGTCAGAGTCTG | 62 | AP | 2570 |
| 1300935 | 23496 | 23511 | N/A | N/A | CCTAGTGTAGAGGCTG | 77 | AP | 77 |
| | 23529 | 23544 | | | | | | |
| 1300947 | 25160 | 25175 | N/A | N/A | ACCTATAAGGACCCAG | 65 | AP | 619 |
| 1300953 | 23033 | 23048 | 3308 | 3323 | TCTGGTCAGGGAATGG | 57 | AP | 1662 |
| 1301001 | 18759 | 18774 | N/A | N/A | AGCATTTAAGCCACCG | 95 | AP | 1224 |
| 1301013 | 19882 | 19897 | N/A | N/A | TTGATTAGTTTCCCCG | 124 | AP | 1687 |
| 1301072 | 23820 | 23835 | N/A | N/A | GATTATTAGTGGGTAT | 52 | AP | 616 |
| 1301102 | 26782 | 26797 | N/A | N/A | CAATCGATAGATCTAC | 57 | AP | 391 |
| 1301104 | 26972 | 26987 | N/A | N/A | TGCATAAAAGTCTCGA | 55 | AP | 1469 |
| 1301108 | 27023 | 27038 | N/A | N/A | AGGCTATACCTAACAC | 33 | AP | 1546 |
| | 27059 | 27074 | | | | | | |
| | 27095 | 27110 | | | | | | |
| | 27113 | 27128 | | | | | | |
| 1301134 | 31077 | 31092 | 3521 | 3536 | TTTGATCCCCTTGTCT | 77 | AP | 1589 |
| 1301161 | 25817 | 25832 | N/A | N/A | GTTTACACCAAGCATG | 68 | AP | 2571 |
| 1232737 | 5138 | 5153 | 90 | 105 | ATGCCATCTTGACCCA | 59 | AQ | 22 |
| 1300734 | 27200 | 27215 | N/A | N/A | CAGTATTGAGACAGGC | 54 | AQ | 2582 |
| 1300752 | 27369 | 27384 | N/A | N/A | AGAGCATTTAGGACCG | 91 | AQ | 2572 |
| 1300758 | 10301 | 10316 | 1101 | 1116 | GGTACTCCAGTAAACC | 72 | AQ | 2694 |
| 1300774 | 11011 | 11026 | 1314 | 1329 | TCTTGGTCTTGCCGAT | 63 | AQ | 2702 |
| 1300800 | 11262 | 11277 | 1565 | 1580 | GCTCATGATCAGGTCC | 64 | AQ | 2111 |
| 1300811 | 5151 | 5166 | 103 | 118 | CAACCACTTCACGATG | 67 | AQ | 946 |
| 1300828 | 12461 | 12476 | 2764 | 2779 | GACTCCACCCGATGAC | 102 | AQ | 2695 |
| 1300843 | 5171 | 5186 | 123 | 138 | GTATTACAGTTTACGG | 61 | AQ | 178 |
| 1300886 | 17662 | 17677 | N/A | N/A | TCGAGCATCATGGTTG | 24 | AQ | 2547 |
| 1300891 | 5293 | 5308 | 245 | 260 | AGTTAGCCAAATGCTT | 81 | AQ | 410 |
| 1300906 | 21594 | 21609 | N/A | N/A | TATGAGGACCCAGGGC | 64 | AQ | 2574 |
| 1300923 | 11044 | 11059 | 1347 | 1362 | CCATCTTAATGGGACT | 73 | AQ | 2585 |
| 1300949 | 25159 | 25174 | N/A | N/A | CCTATAAGGACCCAGC | 72 | AQ | 542 |
| 1300962 | 25166 | 25181 | N/A | N/A | TGTACGACCTATAAGG | 99 | AQ | 2697 |
| 1300965 | 23043 | 23058 | 3318 | 3333 | CCACATAGAGTCTGGT | 72 | AQ | 582 |
| 1300983 | 12138 | 12153 | 2441 | 2456 | CTTTTCGAATTTGCCA | 59 | AQ | 343 |
| 1300991 | 17988 | 18003 | N/A | N/A | CCCATACAAAGCATTC | 63 | AQ | 2576 |
| 1301025 | 20416 | 20431 | N/A | N/A | TGAAGCGGGCGGTGTG | 73 | AQ | 2579 |
| 1301037 | 20590 | 20605 | N/A | N/A | TACACCTGACCAGAGA | 45 | AQ | 2587 |
| 1301053 | 20701 | 20716 | N/A | N/A | AGCTCCGGAATAGAGA | 61 | AQ | 612 |
| | 20743 | 20758 | | | | | | |
| | 20911 | 20926 | | | | | | |
| | 20995 | 21010 | | | | | | |
| 1301056 | 22895 | 22910 | N/A | N/A | GGAAGCACCCGTACCT | 79 | AQ | 2708 |
| 1301089 | 25075 | 25090 | N/A | N/A | CGCTCTGTTTGTGATA | 64 | AQ | 2699 |
| 1301107 | 27022 | 27037 | N/A | N/A | GGCTATACCTAACACA | 56 | AQ | 162 |
| | 27058 | 27073 | | | | | | |
| | 27112 | 27127 | | | | | | |
| 1301116 | 28760 | 28775 | N/A | N/A | AACTATTAAGCAACGG | 58 | AQ | 628 |
| 1301122 | 27027 | 27042 | N/A | N/A | CCATAGGCTATACCTA | 65 | AQ | 470 |
| | 27063 | 27078 | | | | | | |
| 1232737 | 5138 | 5153 | 90 | 105 | ATGCCATCTTGACCCA | 65 | AR | 22 |
| 1300718 | 26960 | 26975 | N/A | N/A | TCGACTGATTAATGCC | 64 | AR | 2558 |
| 1300741 | 27363 | 27378 | N/A | N/A | TTTAGGACCGTCCCCC | 114 | AR | 2569 |
| 1300759 | 5143 | 5158 | 95 | 110 | TCACGATGCCATCTTG | 65 | AR | 2332 |
| 1300760 | 10300 | 10315 | 1100 | 1115 | GTACTCCAGTAAACCC | 65 | AR | 2031 |
| 1300802 | 5150 | 5165 | 102 | 117 | AACCACTTCACGATGC | 68 | AR | 871 |
| 1300813 | 11982 | 11997 | 2285 | 2300 | GTAGAACTTCTCGCAG | 43 | AR | 2583 |
| 1300836 | 12704 | 12719 | N/A | N/A | TATGATGTAGCTGTGG | 82 | AR | 678 |
| 1300840 | 12486 | 12501 | 2789 | 2804 | GTTATGGAGAAACCCC | 68 | AR | 887 |
| 1300859 | 14590 | 14605 | N/A | N/A | GTCCTCAGAGTAAGGC | 37 | AR | 759 |
| | 14882 | 14897 | | | | | | |
| | 15172 | 15187 | | | | | | |
| | 15245 | 15260 | | | | | | |
| 1300869 | 16733 | 16748 | 3051 | 3066 | TCCGAATGTTACAGCC | 77 | AR | 578 |
| 1300893 | 17667 | 17682 | N/A | N/A | ATATATCGAGCATCAT | 56 | AR | 529 |
| 1300895 | 17675 | 17690 | N/A | N/A | GAAATGGAATATATCG | 84 | AR | 1608 |
| 1300904 | 20580 | 20595 | N/A | N/A | CAGAGAGCTCCGGAAT | 40 | AR | 918 |
| | 20706 | 20721 | | | | | | |
| | 20748 | 20763 | | | | | | |
| | 20916 | 20931 | | | | | | |
| | 20958 | 20973 | | | | | | |
| 1300936 | 23531 | 23546 | N/A | N/A | CTCCTAGTGTAGAGGC | 84 | AR | 2561 |
| 1300940 | 23495 | 23510 | N/A | N/A | CTAGTGTAGAGGCTGC | 43 | AR | 615 |
| | 23528 | 23543 | | | | | | |
| 1300942 | 23498 | 23513 | N/A | N/A | TTCCTAGTGTAGAGGC | 68 | AR | 2696 |
| 1300975 | 12137 | 12152 | 2440 | 2455 | TTTTCGAATTTGCCAT | 56 | AR | 2192 |
| 1301002 | 18758 | 18773 | N/A | N/A | GCATTTAAGCCACCGA | 70 | AR | 1147 |
| 1301003 | 18860 | 18875 | N/A | N/A | ACTGTGCAGTAACATA | 47 | AR | 2700 |
| 1301005 | 12144 | 12159 | 2447 | 2462 | ATACCCCTTTTCGAAT | 94 | AR | 2347 |
| 1301078 | 25019 | 25034 | N/A | N/A | GTAACTACATAGAGCA | 49 | AR | 2466 |
| 1301097 | 26787 | 26802 | N/A | N/A | TGCCCCAATCGATAGA | 100 | AR | 2596 |
| 1301106 | 27024 | 27039 | N/A | N/A | TAGGCTATACCTAACA | 100 | AR | 239 |
| | 27060 | 27075 | | | | | | |
| | 27096 | 27111 | | | | | | |
| | 27114 | 27129 | | | | | | |
| 1301115 | 28759 | 28774 | N/A | N/A | ACTATTAAGCAACGGT | 87 | AR | 551 |
| 1301121 | 27111 | 27126 | N/A | N/A | GCTATACCTAACACAT | 57 | AR | 2162 |
| | 27129 | 27144 | | | | | | |
| 1301127 | 29459 | 29474 | N/A | N/A | CAAATTAAGCCCATTC | 58 | AR | 2013 |
| 1301150 | 31084 | 31099 | 3528 | 3543 | AGAGTAGTTTGATCCC | 70 | AR | 2589 |
| 1301158 | 26600 | 26615 | N/A | N/A | TATTTGGTGATACGGT | 36 | AR | 2568 |
| 1232737 | 5138 | 5153 | 90 | 105 | ATGCCATCTTGACCCA | 55 | AS | 22 |
| 1300775 | 11010 | 11025 | 1313 | 1328 | CTTGGTCTTGCCGATG | 83 | AS | 2715 |
| 1300778 | 11004 | 11019 | 1307 | 1322 | CTTGCCGATGGCCAGA | 67 | AS | 2703 |
| 1300788 | 11233 | 11248 | 1536 | 1551 | GTGTCACAAGGCTCAC | 56 | AS | 1418 |
| 1300798 | 11298 | 11313 | 1601 | 1616 | GATCTTGTGGATGGGT | 105 | AS | 2600 |
| 1300835 | 5170 | 5185 | 122 | 137 | TATTACAGTTTACGGT | 61 | AS | 101 |
| 1300860 | 14575 | 14590 | N/A | N/A | CAGGTGCCATCTAGAG | 57 | AS | 1605 |
| | 14867 | 14882 | | | | | | |
| | 15157 | 15172 | | | | | | |
| | 15230 | 15245 | | | | | | |
| 1300888 | 17660 | 17675 | N/A | N/A | GAGCATCATGGTTGTT | 56 | AS | 2601 |
| 1300896 | 17673 | 17688 | N/A | N/A | AATGGAATATATCGAG | 87 | AS | 222 |
| 1300918 | 21603 | 21618 | N/A | N/A | CTTATACAATATGAGG | 68 | AS | 843 |
| 1300926 | 23493 | 23508 | N/A | N/A | AGTGTAGAGGCTGCAT | 51 | AS | 2716 |
| 1300931 | 23301 | 23316 | N/A | N/A | CTTATTAGCAGCAGTA | 41 | AS | 845 |
| 1300941 | 23497 | 23512 | N/A | N/A | TCCTAGTGTAGAGGCT | 42 | AS | 154 |
| | 23530 | 23545 | | | | | | |
| 1300956 | 23007 | 23022 | 3282 | 3297 | ATACTGATGCAAGATC | 57 | AS | 738 |
| 1300964 | 17445 | 17460 | N/A | N/A | GATTAACATTAGGTCT | 76 | AS | 144 |
| 1301004 | 19469 | 19484 | N/A | N/A | GATGAAGAGTGTGATC | 37 | AS | 2578 |
| 1301029 | 20273 | 20288 | N/A | N/A | ACGATTTCATCCCAGC | 53 | AS | 2594 |
| 1301042 | 20422 | 20437 | N/A | N/A | TGTAAGTGAAGCGGGC | 104 | AS | 2580 |
| 1301043 | 12452 | 12467 | 2755 | 2770 | CGATGACAGTTCTCAA | 71 | AS | 2426 |
| 1301065 | 22901 | 22916 | N/A | N/A | GGACAAGGAAGCACCC | 66 | AS | 2605 |
| 1301073 | 23825 | 23840 | N/A | N/A | TGCATGATTATTAGTG | 88 | AS | 2606 |
| 1301105 | 27025 | 27040 | N/A | N/A | ATAGGCTATACCTAAC | 89 | AS | 316 |
| | 27061 | 27076 | | | | | | |
| | 27097 | 27112 | | | | | | |
| | 27115 | 27130 | | | | | | |
| 1301129 | 5141 | 5156 | 93 | 108 | ACGATGCCATCTTGAC | 91 | AS | 2254 |
| 1301133 | 31015 | 31030 | 3459 | 3474 | TGCTGAGTACCGAGGA | 52 | AS | 818 |
| 1301142 | 31022 | 31037 | 3466 | 3481 | TGATTAGTGCTGAGTA | 49 | AS | 1280 |
| 1232737 | 5138 | 5153 | 90 | 105 | ATGCCATCTTGACCCA | 57 | AT | 22 |
| 1300716 | 27028 | 27043 | N/A | N/A | CCCATAGGCTATACCT | 55 | AT | 547 |
| | 27064 | 27079 | | | | | | |
| 1300719 | 26959 | 26974 | N/A | N/A | CGACTGATTAATGCCA | 45 | AT | 2713 |
| 1300729 | 27132 | 27147 | N/A | N/A | GTAGCTATACCTAACA | 79 | AT | 2701 |
| 1300735 | 27362 | 27377 | N/A | N/A | TTAGGACCGTCCCCCG | 94 | AT | 2714 |
| 1300743 | 27368 | 27383 | N/A | N/A | GAGCATTTAGGACCGT | 82 | AT | 1393 |
| 1300771 | 10883 | 10898 | 1186 | 1201 | TCAATGCACTGGAATC | 41 | AT | 2032 |
| 1300773 | 11003 | 11018 | 1306 | 1321 | TTGCCGATGGCCAGAA | 63 | AT | 2718 |
| 1300804 | 11948 | 11963 | 2251 | 2266 | AGGTTCATCCTCAGGA | 73 | AT | 729 |
| 1300822 | 11975 | 11990 | 2278 | 2293 | TTCTCGCAGTCCACTT | 48 | AT | 2705 |
| 1300830 | 12460 | 12475 | 2763 | 2778 | ACTCCACCCGATGACA | 66 | AT | 2706 |
| 1300844 | 14477 | 14492 | N/A | N/A | CTGAGCCTCCTACCGG | 85 | AT | 2219 |
| | 14623 | 14638 | | | | | | |
| | 14769 | 14784 | | | | | | |
| | 14915 | 14930 | | | | | | |
| | 15061 | 15076 | | | | | | |
| 1300861 | 14573 | 14588 | N/A | N/A | GGTGCCATCTAGAGGG | 59 | AT | 1451 |
| | 14865 | 14880 | | | | | | |
| | 15155 | 15170 | | | | | | |
| | 15228 | 15243 | | | | | | |
| 1300868 | 16732 | 16747 | 3050 | 3065 | CCGAATGTTACAGCCA | 67 | AT | 501 |
| 1300894 | 20578 | 20593 | N/A | N/A | GAGAGCTCCGGAATAC | 51 | AT | 841 |
| | 20956 | 20971 | | | | | | |
| 1300902 | 17666 | 17681 | N/A | N/A | TATATCGAGCATCATG | 63 | AT | 452 |
| 1300957 | 23006 | 23021 | 3281 | 3296 | TACTGATGCAAGATCC | 68 | AT | 661 |
| 1300961 | 25164 | 25179 | N/A | N/A | TACGACCTATAAGGAC | 94 | AT | 2603 |
| 1300970 | 23041 | 23056 | 3316 | 3331 | ACATAGAGTCTGGTCA | 92 | AT | 505 |
| 1300988 | 18354 | 18369 | N/A | N/A | GCGGACTTTAACACTT | 55 | AT | 2586 |
| 1301006 | 12143 | 12158 | 2446 | 2461 | TACCCCTTTTCGAATT | 88 | AT | 2614 |
| 1301010 | 18859 | 18874 | N/A | N/A | CTGTGCAGTAACATAT | 64 | AT | 2707 |
| 1301018 | 19881 | 19896 | N/A | N/A | TGATTAGTTTCCCCGT | 32 | AT | 2577 |
| 1301058 | 22431 | 22446 | N/A | N/A | GCATAATGTCCCCGAG | 86 | AT | 536 |
| 1301062 | 20698 | 20713 | N/A | N/A | TCCGGAATAGAGAAAG | 95 | AT | 381 |
| | 20740 | 20755 | | | | | | |
| | 20908 | 20923 | | | | | | |
| | 20992 | 21007 | | | | | | |
| 1301110 | 26971 | 26986 | N/A | N/A | GCATAAAAGTCTCGAC | 63 | AT | 623 |
| 1301153 | 26599 | 26614 | N/A | N/A | ATTTGGTGATACGGTT | 21 | AT | 2709 |
| 1232737 | 5138 | 5153 | 90 | 105 | ATGCCATCTTGACCCA | 52 | AU | 22 |
| 1300723 | 27199 | 27214 | N/A | N/A | AGTATTGAGACAGGCA | 46 | AU | 2622 |
| 1300730 | 27131 | 27146 | N/A | N/A | TAGCTATACCTAACAC | 63 | AU | 2634 |
| 1300744 | 6021 | 6036 | 973 | 988 | CTCCTGTTGATCGCAG | 43 | AU | 644 |
| 1300789 | 5149 | 5164 | 101 | 116 | ACCACTTCACGATGCC | 93 | AU | 792 |
| 1300795 | 11261 | 11276 | 1564 | 1579 | CTCATGATCAGGTCCC | 74 | AU | 2419 |
| 1300834 | 12466 | 12481 | 2769 | 2784 | ACAGTGACTCCACCCG | 55 | AU | 656 |
| 1300845 | 14570 | 14585 | N/A | N/A | GCCATCTAGAGGGATG | 57 | AU | 1297 |
| | 14862 | 14877 | | | | | | |
| | 15152 | 15167 | | | | | | |
| | 15225 | 15240 | | | | | | |
| 1300862 | 14574 | 14589 | N/A | N/A | AGGTGCCATCTAGAGG | 46 | AU | 1528 |
| | 14866 | 14881 | | | | | | |
| | 15156 | 15171 | | | | | | |
| | 15229 | 15244 | | | | | | |
| 1300879 | 16644 | 16659 | 2962 | 2977 | GTTAGACTCTGGCTGG | 68 | AU | 1274 |
| 1300881 | 5290 | 5305 | 242 | 257 | TAGCCAAATGCTTACC | 72 | AU | 1948 |
| 1300889 | 15185 | 15200 | N/A | N/A | CCCGTCAGAGTCTGTC | 28 | AU | 2711 |
| 1300917 | 11043 | 11058 | 1346 | 1361 | CATCTTAATGGGACTC | 60 | AU | 417 |
| 1300951 | 23502 | 23517 | N/A | N/A | CTCTTTCCTAGTGTAG | 40 | AU | 2611 |
| 1300985 | 18353 | 18368 | N/A | N/A | CGGACTTTAACACTTG | 50 | AU | 2639 |
| 1300993 | 18757 | 18772 | N/A | N/A | CATTTAAGCCACCGAA | 71 | AU | 224 |
| 1301027 | 20279 | 20294 | N/A | N/A | TGTTTGACGATTTCAT | 48 | AU | 2712 |
| 1301034 | 12451 | 12466 | 2754 | 2769 | GATGACAGTTCTCAAT | 56 | AU | 2041 |
| 1301046 | 20697 | 20712 | N/A | N/A | CCGGAATAGAGAAAGC | 44 | AU | 304 |
| | 20739 | 20754 | | | | | | |
| | 20907 | 20922 | | | | | | |
| | 20991 | 21006 | | | | | | |
| 1301071 | 23817 | 23832 | N/A | N/A | TATTAGTGGGTATTCC | 80 | AU | 462 |
| 1301087 | 25038 | 25053 | N/A | N/A | AGGTTAGGTATTGACA | 32 | AU | 2595 |
| 1301101 | 26781 | 26796 | N/A | N/A | AATCGATAGATCTACA | 42 | AU | 314 |
| 1301109 | 26970 | 26985 | N/A | N/A | CATAAAAGTCTCGACT | 68 | AU | 2619 |
| 1301118 | 28758 | 28773 | N/A | N/A | CTATTAAGCAACGGTT | 39 | AU | 474 |
| 1301123 | 31014 | 31029 | 3458 | 3473 | GCTGAGTACCGAGGAC | 56 | AU | 741 |
| 1301132 | 28765 | 28780 | N/A | N/A | CTGGTAACTATTAAGC | 89 | AU | 2597 |
| 1301152 | 31083 | 31098 | 3527 | 3542 | GAGTAGTTTGATCCCC | 75 | AU | 2051 |
| 1232737 | 5138 | 5153 | 90 | 105 | ATGCCATCTTGACCCA | 43 | AV | 22 |
| 1300736 | 27206 | 27221 | N/A | N/A | CTTGAGCAGTATTGAG | 75 | AV | 2644 |
| 1300747 | 6020 | 6035 | 972 | 987 | TCCTGTTGATCGCAGC | 63 | AV | 2338 |
| 1300779 | 11009 | 11024 | 1312 | 1327 | TTGGTCTTGCCGATGG | 53 | AV | 2719 |
| 1300790 | 11232 | 11247 | 1535 | 1550 | TGTCACAAGGCTCACC | 59 | AV | 2710 |
| 1300810 | 11947 | 11962 | 2250 | 2265 | GGTTCATCCTCAGGAA | 74 | AV | 652 |
| 1300816 | 11981 | 11996 | 2284 | 2299 | TAGAACTTCTCGCAGT | 12 | AV | 2623 |
| 1300833 | 12703 | 12718 | N/A | N/A | ATGATGTAGCTGTGGC | 63 | AV | 2625 |
| 1300841 | 5169 | 5184 | 121 | 136 | ATTACAGTTTACGGTG | 90 | AV | 1331 |
| 1300846 | 14569 | 14584 | N/A | N/A | CCATCTAGAGGGATGG | 97 | AV | 1220 |
| | 14861 | 14876 | | | | | | |
| | 15151 | 15166 | | | | | | |
| | 15224 | 15239 | | | | | | |
| 1300872 | 14681 | 14696 | N/A | N/A | GGGCTCCAATCAGAGT | 71 | AV | 2145 |
| | 14827 | 14842 | | | | | | |
| | 14973 | 14988 | | | | | | |
| 1300913 | 21600 | 21615 | N/A | N/A | ATACAATATGAGGACC | 88 | AV | 689 |
| 1300966 | 17443 | 17458 | N/A | N/A | TTAACATTAGGTCTTG | 43 | AV | 2638 |
| 1300979 | 12136 | 12151 | 2439 | 2454 | TTTCGAATTTGCCATA | 63 | AV | 266 |
| 1300995 | 18858 | 18873 | N/A | N/A | TGTGCAGTAACATATC | 52 | AV | 2722 |
| 1301019 | 19880 | 19895 | N/A | N/A | GATTAGTTTCCCCGTC | 50 | AV | 1610 |
| 1301033 | 20421 | 20436 | N/A | N/A | GTAAGTGAAGCGGGCG | 113 | AV | 2072 |
| 1301047 | 21014 | 21029 | N/A | N/A | AGGACACACCTGATCA | 88 | AV | 2717 |
| 1301063 | 22900 | 22915 | N/A | N/A | GACAAGGAAGCACCCG | 83 | AV | 2076 |
| 1301082 | 5140 | 5155 | 92 | 107 | CGATGCCATCTTGACC | 48 | AV | 2177 |
| 1301099 | 26786 | 26801 | N/A | N/A | GCCCCAATCGATAGAT | 75 | AV | 2642 |
| 1301103 | 27026 | 27041 | N/A | N/A | CATAGGCTATACCTAA | 107 | AV | 393 |
| | 27062 | 27077 | | | | | | |
| | 27098 | 27113 | | | | | | |
| | 27116 | 27131 | | | | | | |
| 1232737 | 5138 | 5153 | 90 | 105 | ATGCCATCTTGACCCA | 65 | AW | 22 |
| 1300762 | 10297 | 10312 | 1097 | 1112 | CTCCAGTAAACCCATC | 66 | AW | 1877 |
| 1300784 | 11260 | 11275 | 1563 | 1578 | TCATGATCAGGTCCCC | 66 | AW | 2034 |
| 1300823 | 12465 | 12480 | 2768 | 2783 | CAGTGACTCCACCCGA | 61 | AW | 2350 |
| 1300875 | 15111 | 15126 | N/A | N/A | CAGTCAGAGTCTGTCC | 22 | AW | 914 |
| | 15257 | 15272 | | | | | | |
| 1300880 | 16643 | 16658 | 2961 | 2976 | TTAGACTCTGGCTGGT | 80 | AW | 2608 |
| 1300944 | 23535 | 23550 | N/A | N/A | TCCTCTCCTAGTGTAG | 80 | AW | 2724 |
| 1300945 | 25163 | 25178 | N/A | N/A | ACGACCTATAAGGACC | 44 | AW | 2657 |
| 1300946 | 25158 | 25173 | N/A | N/A | CTATAAGGACCCAGCC | 102 | AW | 2592 |
| 1300969 | 23040 | 23055 | 3315 | 3330 | CATAGAGTCTGGTCAG | 69 | AW | 428 |
| 1300989 | 17703 | 17718 | N/A | N/A | ACTCTCATCTATGAAC | 51 | AW | 2725 |
| 1301008 | 19273 | 19288 | N/A | N/A | TGATAGACACTAGAGC | 30 | AW | 2613 |
| 1301011 | 12142 | 12157 | 2445 | 2460 | ACCCCTTTTCGAATTT | 61 | AW | 2269 |
| 1301051 | 20929 | 20944 | N/A | N/A | GAACACACCTGACCAG | 58 | AW | 1689 |
| | 21055 | 21070 | | | | | | |
| 1301076 | 25018 | 25033 | N/A | N/A | TAACTACATAGAGCAT | 63 | AW | 2616 |
| 1301083 | 26779 | 26794 | N/A | N/A | TCGATAGATCTACACA | 62 | AW | 2617 |
| 1301125 | 31012 | 31027 | 3456 | 3471 | TGAGTACCGAGGACAA | 67 | AW | 2358 |
| 1301140 | 31020 | 31035 | 3464 | 3479 | ATTAGTGCTGAGTACC | 123 | AW | 1203 |
| 1301154 | 25814 | 25829 | N/A | N/A | TACACCAAGCATGTGT | 107 | AW | 2607 |
| 1301160 | 26598 | 26613 | N/A | N/A | TTTGGTGATACGGTTA | 31 | AW | 2726 |
| 1232737 | 5138 | 5153 | 90 | 105 | ATGCCATCTTGACCCA | 43 | AX | 22 |
| 1300727 | 27198 | 27213 | N/A | N/A | GTATTGAGACAGGCAG | 73 | AX | 854 |
| 1300748 | 27367 | 27382 | N/A | N/A | AGCATTTAGGACCGTC | 56 | AX | 1316 |
| 1300755 | 10295 | 10310 | 1095 | 1110 | CCAGTAAACCCATCCA | 53 | AX | 1723 |
| 1300763 | 10880 | 10895 | 1183 | 1198 | ATGCACTGGAATCTGC | 41 | AX | 1801 |
| 1300765 | 11001 | 11016 | 1304 | 1319 | GCCGATGGCCAGAAGC | 68 | AX | 2621 |
| 1300814 | 11974 | 11989 | 2277 | 2292 | TCTCGCAGTCCACTTC | 63 | AX | 2720 |
| 1300839 | 12702 | 12717 | N/A | N/A | TGATGTAGCTGTGGCA | 42 | AX | 2654 |
| 1300848 | 14572 | 14587 | N/A | N/A | GTGCCATCTAGAGGGA | 94 | AX | 1374 |
| | 14864 | 14879 | | | | | | |
| | 15154 | 15169 | | | | | | |
| | 15227 | 15242 | | | | | | |
| 1300853 | 5288 | 5303 | 240 | 255 | GCCAAATGCTTACCAG | 47 | AX | 333 |
| 1300876 | 15112 | 15127 | N/A | N/A | CCAGTCAGAGTCTGTC | 11 | AX | 991 |
| | 15258 | 15273 | | | | | | |
| 1300884 | 17665 | 17680 | N/A | N/A | ATATCGAGCATCATGG | 38 | AX | 375 |
| 1300892 | 15184 | 15199 | N/A | N/A | CCGTCAGAGTCTGTCC | 28 | AX | 2721 |
| 1300900 | 17672 | 17687 | N/A | N/A | ATGGAATATATCGAGC | 15 | AX | 145 |
| 1300919 | 11042 | 11057 | 1345 | 1360 | ATCTTAATGGGACTCA | 39 | AX | 340 |
| 1300920 | 23282 | 23297 | N/A | N/A | ATTATATGCCTCCAGT | 73 | AX | 2626 |
| 1300924 | 23492 | 23507 | N/A | N/A | GTGTAGAGGCTGCATG | 35 | AX | 2610 |
| 1300976 | 12135 | 12150 | 2438 | 2453 | TTCGAATTTGCCATAG | 39 | AX | 189 |
| 1300994 | 18756 | 18771 | N/A | N/A | ATTTAAGCCACCGAAC | 80 | AX | 2646 |
| 1301015 | 20272 | 20287 | N/A | N/A | CGATTTCATCCCAGCC | 45 | AX | 2615 |
| 1301038 | 20426 | 20441 | N/A | N/A | GGTTTGTAAGTGAAGC | 34 | AX | 2659 |
| 1301040 | 20420 | 20435 | N/A | N/A | TAAGTGAAGCGGGCGG | 109 | AX | 2630 |
| 1301059 | 22430 | 22445 | N/A | N/A | CATAATGTCCCCGAGG | 57 | AX | 2632 |
| 1301061 | 12457 | 12472 | 2760 | 2775 | CCACCCGATGACAGTT | 64 | AX | 2631 |
| 1301119 | 28757 | 28772 | N/A | N/A | TATTAAGCAACGGTTA | 45 | AX | 1549 |
| 1232737 | 5138 | 5153 | 90 | 105 | ATGCCATCTTGACCCA | 69 | AY | 22 |
| 1300745 | 6019 | 6034 | 971 | 986 | CCTGTTGATCGCAGCG | 69 | AY | 2260 |
| 1300767 | 10305 | 10320 | 1105 | 1120 | GAAAGGTACTCCAGTA | 62 | AY | 338 |
| 1300792 | 11231 | 11246 | 1534 | 1549 | GTCACAAGGCTCACCT | 56 | AY | 2624 |
| 1300794 | 11297 | 11312 | 1600 | 1615 | ATCTTGTGGATGGGTG | 45 | AY | 2265 |
| 1300806 | 11304 | 11319 | 1607 | 1622 | TCTCACGATCTTGTGG | 53 | AY | 882 |
| 1300849 | 14571 | 14586 | N/A | N/A | TGCCATCTAGAGGGAT | 62 | AY | 450 |
| | 14863 | 14878 | | | | | | |
| | 15153 | 15168 | | | | | | |
| | 15226 | 15241 | | | | | | |
| 1300870 | 16731 | 16746 | 3049 | 3064 | CGAATGTTACAGCCAG | 89 | AY | 2353 |
| 1300905 | 20582 | 20597 | N/A | N/A | ACCAGAGAGCTCCGGA | 54 | AY | 611 |
| | 20708 | 20723 | | | | | | |
| | 20750 | 20765 | | | | | | |
| | 20918 | 20933 | | | | | | |
| 1300915 | 21599 | 21614 | N/A | N/A | TACAATATGAGGACCC | 83 | AY | 228 |
| 1300943 | 23501 | 23516 | N/A | N/A | TCTTTCCTAGTGTAGA | 76 | AY | 2635 |
| 1300950 | 23534 | 23549 | N/A | N/A | CCTCTCCTAGTGTAGA | 91 | AY | 2732 |
| 1300958 | 23004 | 23019 | 3279 | 3294 | CTGATGCAAGATCCTG | 47 | AY | 2277 |
| 1300982 | 17449 | 17464 | N/A | N/A | ACTAGATTAACATTAG | 103 | AY | 992 |
| 1300998 | 18857 | 18872 | N/A | N/A | GTGCAGTAACATATCC | 42 | AY | 2489 |
| 1301032 | 20277 | 20292 | N/A | N/A | TTTGACGATTTCATCC | 72 | AY | 2731 |
| 1301067 | 23824 | 23839 | N/A | N/A | GCATGATTATTAGTGG | 47 | AY | 2633 |
| 1301070 | 22899 | 22914 | N/A | N/A | ACAAGGAAGCACCCGT | 58 | AY | 1999 |
| 1301100 | 26785 | 26800 | N/A | N/A | CCCCAATCGATAGATC | 83 | AY | 2661 |
| 1301135 | 31019 | 31034 | 3463 | 3478 | TTAGTGCTGAGTACCG | 77 | AY | 1126 |
| 1301159 | 26596 | 26611 | N/A | N/A | TGGTGATACGGTTACT | 44 | AY | 2496 |
| 1232737 | 5138 | 5153 | 90 | 105 | ATGCCATCTTGACCCA | 63 | AZ | 22 |
| 1300722 | 26958 | 26973 | N/A | N/A | GACTGATTAATGCCAC | 56 | AZ | 2620 |
| 1300785 | 11259 | 11274 | 1562 | 1577 | CATGATCAGGTCCCCC | 77 | AZ | 1957 |
| 1300791 | 5148 | 5163 | 100 | 115 | CCACTTCACGATGCCA | 60 | AZ | 407 |
| 1300815 | 11980 | 11995 | 2283 | 2298 | AGAACTTCTCGCAGTC | 46 | AZ | 2723 |
| 1300827 | 12464 | 12479 | 2767 | 2782 | AGTGACTCCACCCGAT | 42 | AZ | 2733 |
| 1300897 | 17671 | 17686 | N/A | N/A | TGGAATATATCGAGCA | 16 | AZ | 1454 |
| 1300910 | 20704 | 20719 | N/A | N/A | GAGAGCTCCGGAATAG | 82 | AZ | 842 |
| | 20746 | 20761 | | | | | | |
| | 20914 | 20929 | | | | | | |
| 1300929 | 23491 | 23506 | N/A | N/A | TGTAGAGGCTGCATGC | 88 | AZ | 2501 |
| 1300967 | 17441 | 17456 | N/A | N/A | AACATTAGGTCTTGTG | 41 | AZ | 684 |
| 1300971 | 23039 | 23054 | 3314 | 3329 | ATAGAGTCTGGTCAGG | 97 | AZ | 351 |
| 1300973 | 17698 | 17713 | N/A | N/A | CATCTATGAACATGGC | 48 | AZ | 1916 |
| 1300990 | 18352 | 18367 | N/A | N/A | GGACTTTAACACTTGC | 41 | AZ | 2665 |
| 1301016 | 19887 | 19902 | N/A | N/A | GATTCTTGATTAGTTT | 32 | AZ | 2671 |
| 1301031 | 12449 | 12464 | 2752 | 2767 | TGACAGTTCTCAATGC | 69 | AZ | 2727 |
| 1301035 | 5139 | 5154 | 91 | 106 | GATGCCATCTTGACCC | 46 | AZ | 2100 |
| 1301084 | 25079 | 25094 | N/A | N/A | AGGCCGCTCTGTTTGT | 116 | AZ | 2666 |
| 1301090 | 25036 | 25051 | N/A | N/A | GTTAGGTATTGACAAT | 95 | AZ | 2651 |
| 1301096 | 26968 | 26983 | N/A | N/A | TAAAAGTCTCGACTGA | 43 | AZ | 546 |
| 1301130 | 28763 | 28778 | N/A | N/A | GGTAACTATTAAGCAA | 107 | AZ | 2653 |
| 1301151 | 31082 | 31097 | 3526 | 3541 | AGTAGTTTGATCCCCT | 71 | AZ | 1974 |

### Example 4: Effect of Mixed MOE and cEt, Uniform Phosphorothioate Modified Oligonucleotides on Human NLRP3 RNA In Vitro, Single Dose

[0340] Modified oligonucleotides complementary to human NLRP3 nucleic acid were designed and tested for their single dose effects on NLRP3 RNA in vitro. The modified oligonucleotides were tested in a series of experiments that had the same culture conditions.

[0341] The modified oligonucleotides in the table below are 16 nucleosides in length, wherein the sugar motif for the modified oligonucleotides is (from 5′ to 3′); kkkdddddddddkkke; wherein each “d” represents a 2′-β-D-deoxyribosyl sugar moiety, each “e” represents a 2′-MOE sugar moiety, and each “k” represents a cEt sugar moiety. The internucleoside linkage motif for the modified oligonucleotides is (from 5′ to 3′): sssssssssssssss; wherein each “s” represents a phosphorothioate internucleoside linkage. Each cytosine residue is a 5-methyl cytosine.

[0342] “Start site” indicates the 5′-most nucleoside to which the modified oligonucleotide is complementary in the target nucleic acid sequence. “Stop site” indicates the 3′-most nucleoside to which the modified oligonucleotide is complementary in the target nucleic acid sequence. Each modified oligonucleotide listed in the tables below is 100% complementary to SEQ ID NO: 1 (described herein above), to SEQ ID NO: 2 (described herein above), or to both. “N/A” indicates that the modified oligonucleotide is not 100% complementary to that particular target nucleic acid sequence.

[0343] Cultured THP-1 cells were treated with modified oligonucleotide at a concentration of 2000 nM by electroporation at a density of 300,000 cells per well. After a treatment period of approximately 24 hours, total RNA was isolated from the cells and NLRP3 RNA levels were measured by quantitative real-time RTPCR. NLRP3 RNA levels were measured by human primer-probe set RTS37509 (described herein above). NLRP3 RNA levels were normalized to total RNA content, as measured by RIBOGREEN®. Reduction of NLRP3 RNA is presented in the tables below as percent NLRP3 RNA relative to the amount of NLRP3 RNA in untreated control cells (% UTC).

[0344] Each separate experimental analysis described in this example is identified by a letter ID in the table column below labeled “AID” (Analysis ID). In the table below, Compound No. 1232737 (described herein above) was used as a benchmark on multiple plates.

TABLE 6
Reduction of NLRP3 RNA by modified oligonucleotides with a mixed MOE/cEt sugar motif
and uniform phosphorothioate internucleoside linkages at a concentration of 2000 nM
in THP-1 cells

| | SEQ | SEQ | SEQ | SEQ | | | | |
|---|---|---|---|---|---|---|---|---|
| | ID | ID | ID | ID | | | | |
| | No: 1 | No: 1 | No: 2 | No: 2 | | NLRP3 | | |
| Compound | Start | Stop | Start | Stop | | (% | | SEQ ID |
| Number | Site | Site | Site | Site | Sequence (5′ to 3′) | UTC) | AID | NO |
| 1232737 | 5138 | 5153 | 90 | 105 | ATGCCATCTTGACCCA | 60 | AH | 22 |
| 1300264 | 27094 | 27109 | N/A | N/A | GGCTATACCTAACACG | 35 | AH | 2515 |
| 1300267 | 26957 | 26972 | N/A | N/A | ACTGATTAATGCCACT | 36 | AH | 1392 |
| 1300329 | 5147 | 5162 | 99 | 114 | CACTTCACGATGCCAT | 53 | AH | 330 |
| 1300366 | 11979 | 11994 | 2282 | 2297 | GAACTTCTCGCAGTCC | 61 | AH | 1114 |
| 1300371 | 5166 | 5181 | 118 | 133 | ACAGTTTACGGTGAAC | 58 | AH | 562 |
| 1300375 | 12464 | 12479 | 2767 | 2782 | AGTGACTCCACCCGAT | 66 | AH | 2733 |
| 1300402 | 14680 | 14695 | N/A | N/A | GGCTCCAATCAGAGTC | 89 | AH | 2453 |
| | 14826 | 14841 | | | | | | |
| | 14972 | 14987 | | | | | | |
| 1300409 | 14575 | 14590 | N/A | N/A | CAGGTGCCATCTAGAG | 29 | AH | 1605 |
| | 14867 | 14882 | | | | | | |
| | 15157 | 15172 | | | | | | |
| | 15230 | 15245 | | | | | | |
| 1300450 | 17670 | 17685 | N/A | N/A | GGAATATATCGAGCAT | 22 | AH | 1377 |
| 1300478 | 5137 | 5152 | 89 | 104 | TGCCATCTTGACCCAT | 69 | AH | 2408 |
| 1300484 | 23500 | 23515 | N/A | N/A | CTTTCCTAGTGTAGAG | 66 | AH | 2518 |
| 1300485 | 23496 | 23511 | N/A | N/A | CCTAGTGTAGAGGCTG | 24 | AH | 77 |
| | 23529 | 23544 | | | | | | |
| 1300516 | 23038 | 23053 | 3313 | 3328 | TAGAGTCTGGTCAGGG | 46 | AH | 1893 |
| 1300522 | 17698 | 17713 | N/A | N/A | CATCTATGAACATGGC | 31 | AH | 1916 |
| 1300530 | 17448 | 17463 | N/A | N/A | CTAGATTAACATTAGG | 56 | AH | 915 |
| 1300542 | 18755 | 18770 | N/A | N/A | TTTAAGCCACCGAACA | 88 | AH | 2509 |
| 1300546 | 12141 | 12156 | 2444 | 2459 | CCCCTTTTCGAATTTG | 59 | AH | 574 |
| 1300563 | 19887 | 19902 | N/A | N/A | GATTCTTGATTAGTTT | 53 | AH | 2671 |
| 1300596 | 20593 | 20608 | N/A | N/A | GAATACACCTGACCAG | 75 | AH | 227 |
| 1300660 | 26968 | 26983 | N/A | N/A | TAAAAGTCTCGACTGA | 65 | AH | 546 |
| 1300687 | 31018 | 31033 | 3462 | 3477 | TAGTGCTGAGTACCGA | 38 | AH | 1049 |
| 1232737 | 5138 | 5153 | 90 | 105 | ATGCCATCTTGACCCA | 54 | AI | 22 |
| 1300262 | 27028 | 27043 | N/A | N/A | CCCATAGGCTATACCT | 34 | AI | 547 |
| | 27064 | 27079 | | | | | | |
| 1300269 | 5249 | 5264 | 201 | 216 | CAGGAGTGTGTCCTGA | 91 | AI | 2663 |
| 1300297 | 6018 | 6033 | 970 | 985 | CTGTTGATCGCAGCGA | 57 | AI | 2183 |
| 1300305 | 10303 | 10318 | 1103 | 1118 | AAGGTACTCCAGTAAA | 71 | AI | 2516 |
| 1300316 | 10928 | 10943 | 1231 | 1246 | CGTTTGTTGAGGCTCA | 32 | AI | 1417 |
| 1300328 | 11007 | 11022 | 1310 | 1325 | GGTCTTGCCGATGGCC | 52 | AI | 2675 |
| 1300360 | 11302 | 11317 | 1605 | 1620 | TCACGATCTTGTGGAT | 79 | AI | 803 |
| 1300403 | 14679 | 14694 | N/A | N/A | GCTCCAATCAGAGTCT | 57 | AI | 2068 |
| | 14825 | 14840 | | | | | | |
| | 14971 | 14986 | | | | | | |
| 1300431 | 15183 | 15198 | N/A | N/A | CGTCAGAGTCTGTCCT | 23 | AI | 2656 |
| 1300470 | 21598 | 21613 | N/A | N/A | ACAATATGAGGACCCA | 38 | AI | 2383 |
| 1300510 | 11048 | 11063 | 1351 | 1366 | AACTCCATCTTAATGG | 75 | AI | 2110 |
| 1300517 | 12134 | 12149 | 2437 | 2452 | TCGAATTTGCCATAGT | 49 | AI | 2115 |
| 1300544 | 18856 | 18871 | N/A | N/A | TGCAGTAACATATCCA | 40 | AI | 1532 |
| 1300587 | 20424 | 20439 | N/A | N/A | TTTGTAAGTGAAGCGG | 36 | AI | 2491 |
| 1300594 | 12455 | 12470 | 2758 | 2773 | ACCCGATGACAGTTCT | 57 | AI | 2195 |
| 1300600 | 20592 | 20607 | N/A | N/A | AATACACCTGACCAGA | 58 | AI | 1457 |
| 1300619 | 22898 | 22913 | N/A | N/A | CAAGGAAGCACCCGTA | 54 | AI | 2492 |
| 1300631 | 25077 | 25092 | N/A | N/A | GCCGCTCTGTTTGTGA | 71 | AI | 2677 |
| 1300640 | 25034 | 25049 | N/A | N/A | TAGGTATTGACAATAG | 42 | AI | 2494 |
| 1300657 | 27023 | 27038 | N/A | N/A | AGGCTATACCTAACAC | 22 | AI | 1546 |
| | 27059 | 27074 | | | | | | |
| | 27095 | 27110 | | | | | | |
| | 27113 | 27128 | | | | | | |
| 1300696 | 35776 | 35791 | 4129 | 4144 | GAGCTAATTACATGAG | 57 | AI | 824 |
| 1232737 | 5138 | 5153 | 90 | 105 | ATGCCATCTTGACCCA | 77 | AJ | 22 |
| 1300317 | 10927 | 10942 | 1230 | 1245 | GTTTGTTGAGGCTCAC | 35 | AJ | 2680 |
| 1300332 | 11258 | 11273 | 1561 | 1576 | ATGATCAGGTCCCCCA | 63 | AJ | 1880 |
| 1300353 | 11972 | 11987 | 2275 | 2290 | TCGCAGTCCACTTCCT | 64 | AJ | 2668 |
| 1300396 | 14477 | 14492 | N/A | N/A | CTGAGCCTCCTACCGG | 83 | AJ | 2219 |
| | 14623 | 14638 | | | | | | |
| | 14769 | 14784 | | | | | | |
| | 14915 | 14930 | | | | | | |
| | 15061 | 15076 | | | | | | |
| 1300415 | 16641 | 16656 | 2959 | 2974 | AGACTCTGGCTGGTGC | 64 | AJ | 2670 |
| 1300418 | 16737 | 16752 | 3055 | 3070 | AATCTCCGAATGTTAC | 94 | AJ | 271 |
| 1300482 | 23533 | 23548 | N/A | N/A | CTCTCCTAGTGTAGAG | 96 | AJ | 2488 |
| 1300489 | 23497 | 23512 | N/A | N/A | TCCTAGTGTAGAGGCT | 31 | AJ | 154 |
| | 23530 | 23545 | | | | | | |
| 1300502 | 12133 | 12148 | 2436 | 2451 | CGAATTTGCCATAGTT | 52 | AJ | 2423 |
| 1300509 | 23000 | 23015 | 3275 | 3290 | TGCAAGATCCTGACAA | 83 | AJ | 2046 |
| 1300535 | 12140 | 12155 | 2443 | 2458 | CCCTTTTCGAATTTGC | 39 | AJ | 497 |
| 1300567 | 19878 | 19893 | N/A | N/A | TTAGTTTCCCCGTCAC | 35 | AJ | 2679 |
| 1300606 | 22429 | 22444 | N/A | N/A | ATAATGTCCCCGAGGC | 45 | AJ | 2493 |
| 1300626 | 24554 | 24569 | N/A | N/A | AGTCAAATTGCCAAGG | 78 | AJ | 2521 |
| 1300662 | 27026 | 27041 | N/A | N/A | CATAGGCTATACCTAA | 77 | AJ | 393 |
| | 27062 | 27077 | | | | | | |
| | 27098 | 27113 | | | | | | |
| | 27116 | 27131 | | | | | | |
| 1300691 | 25745 | 25760 | N/A | N/A | GTTGAAATTGAGAGGT | 35 | AJ | 1235 |
| 1300698 | 31080 | 31095 | 3524 | 3539 | TAGTTTGATCCCCTTG | 78 | AJ | 1820 |
| 1300712 | 26602 | 26617 | N/A | N/A | CTTATTTGGTGATACG | 46 | AJ | 1237 |
| 1232737 | 5138 | 5153 | 90 | 105 | ATGCCATCTTGACCCA | 64 | AK | 22 |
| 1300263 | 26962 | 26977 | N/A | N/A | TCTCGACTGATTAATG | 47 | AK | 2667 |
| 1300276 | 27195 | 27210 | N/A | N/A | TTGAGACAGGCAGTAC | 61 | AK | 2673 |
| 1300283 | 27365 | 27380 | N/A | N/A | CATTTAGGACCGTCCC | 81 | AK | 164 |
| 1300285 | 27202 | 27217 | N/A | N/A | AGCAGTATTGAGACAG | 52 | AK | 2497 |
| 1300349 | 11264 | 11279 | 1567 | 1582 | CAGCTCATGATCAGGT | 25 | AK | 2676 |
| 1300359 | 11301 | 11316 | 1604 | 1619 | CACGATCTTGTGGATG | 59 | AK | 726 |
| 1300368 | 11978 | 11993 | 2281 | 2296 | AACTTCTCGCAGTCCA | 37 | AK | 1037 |
| 1300374 | 12463 | 12478 | 2766 | 2781 | GTGACTCCACCCGATG | 36 | AK | 2272 |
| 1300377 | 12275 | 12290 | 2578 | 2593 | GCTTTCACTTCAATCC | 41 | AK | 1347 |
| 1300386 | 12491 | 12506 | 2794 | 2809 | GGCATGTTATGGAGAA | 54 | AK | 1118 |
| 1300395 | 14478 | 14493 | N/A | N/A | GCTGAGCCTCCTACCG | 30 | AK | 2296 |
| | 14624 | 14639 | | | | | | |
| | 14770 | 14785 | | | | | | |
| | 14916 | 14931 | | | | | | |
| | 15062 | 15077 | | | | | | |
| 1300404 | 14678 | 14693 | N/A | N/A | CTCCAATCAGAGTCTG | 51 | AK | 1991 |
| | 14824 | 14839 | | | | | | |
| | 14970 | 14985 | | | | | | |
| 1300416 | 16727 | 16742 | 3045 | 3060 | TGTTACAGCCAGGATG | 78 | AK | 2669 |
| 1300421 | 15115 | 15130 | N/A | N/A | GTTCCAGTCAGAGTCT | 33 | AK | 2681 |
| 1300453 | 11040 | 11055 | 1343 | 1358 | CTTAATGGGACTCACG | 31 | AK | 186 |
| 1300499 | 25161 | 25176 | N/A | N/A | GACCTATAAGGACCCA | 46 | AK | 81 |
| 1300519 | 23035 | 23050 | 3310 | 3325 | AGTCTGGTCAGGGAAT | 44 | AK | 2686 |
| 1300524 | 17697 | 17712 | N/A | N/A | ATCTATGAACATGGCC | 40 | AK | 1839 |
| 1300529 | 17447 | 17462 | N/A | N/A | TAGATTAACATTAGGT | 23 | AK | 838 |
| 1300554 | 19269 | 19284 | N/A | N/A | AGACACTAGAGCCTCA | 49 | AK | 2504 |
| 1300562 | 19884 | 19899 | N/A | N/A | TCTTGATTAGTTTCCC | 20 | AK | 2511 |
| 1300572 | 20275 | 20290 | N/A | N/A | TGACGATTTCATCCCA | 22 | AK | 2512 |
| 1300573 | 20418 | 20433 | N/A | N/A | AGTGAAGCGGGCGGTG | 60 | AK | 2530 |
| 1300615 | 23822 | 23837 | N/A | N/A | ATGATTATTAGTGGGT | 47 | AK | 2463 |
| 1300647 | 26784 | 26799 | N/A | N/A | CCCAATCGATAGATCT | 54 | AK | 468 |
| 1300666 | 27099 | 27114 | N/A | N/A | ACATAGGCTATACCTA | 64 | AK | 394 |
| | 27117 | 27132 | | | | | | |
| 1300672 | 28762 | 28777 | N/A | N/A | GTAACTATTAAGCAAC | 54 | AK | 1626 |
| 1300690 | 31017 | 31032 | 3461 | 3476 | AGTGCTGAGTACCGAG | 35 | AK | 972 |
| 1232737 | 5138 | 5153 | 90 | 105 | ATGCCATCTTGACCCA | 63 | AL | 22 |
| 1300279 | 27100 | 27115 | N/A | N/A | CACATAGGCTATACCT | 40 | AL | 1623 |
| | 27118 | 27133 | | | | | | |
| 1300310 | 6025 | 6040 | 977 | 992 | GTCTCTCCTGTTGATC | 84 | AL | 2674 |
| 1300319 | 5146 | 5161 | 98 | 113 | ACTTCACGATGCCATC | 39 | AL | 715 |
| 1300354 | 11955 | 11970 | 2258 | 2273 | TTGGAACAGGTTCATC | 59 | AL | 2545 |
| 1300362 | 5153 | 5168 | 105 | 120 | AACAACCACTTCACGA | 72 | AL | 2546 |
| 1300378 | 12462 | 12477 | 2765 | 2780 | TGACTCCACCCGATGA | 97 | AL | 2692 |
| 1300393 | 14570 | 14585 | N/A | N/A | GCCATCTAGAGGGATG | 65 | AL | 1297 |
| | 14862 | 14877 | | | | | | |
| | 15152 | 15167 | | | | | | |
| | 15225 | 15240 | | | | | | |
| 1300434 | 17663 | 17678 | N/A | N/A | ATCGAGCATCATGGTT | 50 | AL | 2517 |
| 1300449 | 17669 | 17684 | N/A | N/A | GAATATATCGAGCATC | 32 | AL | 68 |
| 1300452 | 21597 | 21612 | N/A | N/A | CAATATGAGGACCCAG | 55 | AL | 2305 |
| 1300475 | 23305 | 23320 | N/A | N/A | TTATCTTATTAGCAGC | 40 | AL | 922 |
| 1300486 | 23499 | 23514 | N/A | N/A | TTTCCTAGTGTAGAGG | 40 | AL | 2554 |
| 1300533 | 17992 | 18007 | N/A | N/A | TCAACCCATACAAAGC | 61 | AL | 2519 |
| 1300561 | 19877 | 19892 | N/A | N/A | TAGTTTCCCCGTCACA | 49 | AL | 2538 |
| 1300598 | 12454 | 12469 | 2757 | 2772 | CCCGATGACAGTTCTC | 37 | AL | 268 |
| 1300609 | 22427 | 22442 | N/A | N/A | AATGTCCCCGAGGCTC | 57 | AL | 2687 |
| 1300659 | 26973 | 26988 | N/A | N/A | ATGCATAAAAGTCTCG | 44 | AL | 85 |
| 1300680 | 28761 | 28776 | N/A | N/A | TAACTATTAAGCAACG | 64 | AL | 90 |
| 1300695 | 35773 | 35788 | 4126 | 4141 | CTAATTACATGAGGTC | 29 | AL | 2364 |
| 1300704 | 5247 | 5262 | 199 | 214 | GGAGTGTGTCCTGAGC | 49 | AL | 2255 |
| 1232737 | 5138 | 5153 | 90 | 105 | ATGCCATCTTGACCCA | 75 | AM | 22 |
| 1300280 | 27106 | 27121 | N/A | N/A | ACCTAACACATAGGCT | 51 | AM | 2085 |
| | 27124 | 27139 | | | | | | |
| 1300290 | 27201 | 27216 | N/A | N/A | GCAGTATTGAGACAGG | 49 | AM | 931 |
| 1300300 | 6017 | 6032 | 969 | 984 | TGTTGATCGCAGCGAA | 43 | AM | 2106 |
| 1300302 | 10302 | 10317 | 1102 | 1117 | AGGTACTCCAGTAAAC | 62 | AM | 2689 |
| 1300322 | 11013 | 11028 | 1316 | 1331 | CGTCTTGGTCTTGCCG | 88 | AM | 2690 |
| 1300326 | 11006 | 11021 | 1309 | 1324 | GTCTTGCCGATGGCCA | 50 | AM | 1956 |
| 1300335 | 11236 | 11251 | 1539 | 1554 | TCTGTGTCACAAGGCT | 62 | AM | 1649 |
| 1300392 | 14572 | 14587 | N/A | N/A | GTGCCATCTAGAGGGA | 83 | AM | 1374 |
| | 14864 | 14879 | | | | | | |
| | 15154 | 15169 | | | | | | |
| | 15227 | 15242 | | | | | | |
| 1300397 | 5172 | 5187 | 124 | 139 | TGTATTACAGTTTACG | 89 | AM | 255 |
| 1300414 | 16735 | 16750 | 3053 | 3068 | TCTCCGAATGTTACAG | 67 | AM | 117 |
| 1300426 | 16647 | 16662 | 2965 | 2980 | TCAGTTAGACTCTGGC | 60 | AM | 1505 |
| 1300429 | 5136 | 5151 | 88 | 103 | GCCATCTTGACCCATC | 72 | AM | 2678 |
| 1300483 | 11046 | 11061 | 1349 | 1364 | CTCCATCTTAATGGGA | 96 | AM | 2528 |
| 1300534 | 18753 | 18768 | N/A | N/A | TAAGCCACCGAACAGC | 51 | AM | 2563 |
| 1300559 | 19268 | 19283 | N/A | N/A | GACACTAGAGCCTCAG | 44 | AM | 1686 |
| 1300564 | 19883 | 19898 | N/A | N/A | CTTGATTAGTTTCCCC | 33 | AM | 1764 |
| 1300590 | 20423 | 20438 | N/A | N/A | TTGTAAGTGAAGCGGG | 51 | AM | 2550 |
| 1300618 | 23821 | 23836 | N/A | N/A | TGATTATTAGTGGGTA | 46 | AM | 2078 |
| 1300636 | 25032 | 25047 | N/A | N/A | GGTATTGACAATAGTA | 21 | AM | 2682 |
| 1300674 | 29462 | 29477 | N/A | N/A | AGTCAAATTAAGCCCA | 85 | AM | 245 |
| 1300692 | 35770 | 35785 | 4123 | 4138 | ATTACATGAGGTCACC | 37 | AM | 2567 |
| 1300703 | 26601 | 26616 | N/A | N/A | TTATTTGGTGATACGG | 50 | AM | 1160 |
| 1300707 | 25820 | 25835 | N/A | N/A | TATGTTTACACCAAGC | 22 | AM | 2522 |
| 1232737 | 5138 | 5153 | 90 | 105 | ATGCCATCTTGACCCA | 87 | AN | 22 |
| 1300268 | 5133 | 5148 | 85 | 100 | ATCTTGACCCATCAGC | 57 | AN | 21 |
| 1300284 | 27364 | 27379 | N/A | N/A | ATTTAGGACCGTCCCC | 104 | AN | 87 |
| 1300298 | 27370 | 27385 | N/A | N/A | CAGAGCATTTAGGACC | 81 | AN | 2525 |
| 1300304 | 6023 | 6038 | 975 | 990 | CTCTCCTGTTGATCGC | 72 | AN | 798 |
| 1300313 | 10925 | 10940 | 1228 | 1243 | TTGTTGAGGCTCACAC | 75 | AN | 2684 |
| 1300342 | 11300 | 11315 | 1603 | 1618 | ACGATCTTGTGGATGG | 59 | AN | 649 |
| 1300369 | 11977 | 11992 | 2280 | 2295 | ACTTCTCGCAGTCCAC | 46 | AN | 960 |
| 1300391 | 14571 | 14586 | N/A | N/A | TGCCATCTAGAGGGAT | 65 | AN | 450 |
| | 14863 | 14878 | | | | | | |
| | 15153 | 15168 | | | | | | |
| | 15226 | 15241 | | | | | | |
| 1300394 | 12709 | 12724 | N/A | N/A | GGCATTATGATGTAGC | 49 | AN | 832 |
| 1300405 | 14580 | 14595 | N/A | N/A | TAAGGCAGGTGCCATC | 44 | AN | 1913 |
| | 14872 | 14887 | | | | | | |
| | 15162 | 15177 | | | | | | |
| | 15235 | 15250 | | | | | | |
| 1300412 | 16734 | 16749 | 3052 | 3067 | CTCCGAATGTTACAGC | 86 | AN | 40 |
| 1300454 | 21596 | 21611 | N/A | N/A | AATATGAGGACCCAGG | 49 | AN | 151 |
| 1300465 | 23280 | 23295 | N/A | N/A | TATATGCCTCCAGTCC | 72 | AN | 2537 |
| 1300493 | 25160 | 25175 | N/A | N/A | ACCTATAAGGACCCAG | 54 | AN | 619 |
| 1300521 | 17446 | 17461 | N/A | N/A | AGATTAACATTAGGTC | 35 | AN | 761 |
| 1300526 | 17696 | 17711 | N/A | N/A | TCTATGAACATGGCCC | 51 | AN | 2556 |
| 1300539 | 12139 | 12154 | 2442 | 2457 | CCTTTTCGAATTTGCC | 22 | AN | 420 |
| 1300545 | 18760 | 18775 | N/A | N/A | AAGCATTTAAGCCACC | 55 | AN | 1301 |
| 1300584 | 20591 | 20606 | N/A | N/A | ATACACCTGACCAGAG | 47 | AN | 2531 |
| 1300603 | 22897 | 22912 | N/A | N/A | AAGGAAGCACCCGTAC | 101 | AN | 2539 |
| 1300616 | 22902 | 22917 | N/A | N/A | TGGACAAGGAAGCACC | 71 | AN | 2565 |
| 1300629 | 24553 | 24568 | N/A | N/A | GTCAAATTGCCAAGGA | 66 | AN | 1003 |
| 1300633 | 25076 | 25091 | N/A | N/A | CCGCTCTGTTTGTGAT | 88 | AN | 2683 |
| 1300635 | 14501 | 14516 | N/A | N/A | AGGTGCTATCTAGAGA | 19 | AN | 1681 |
| | 14647 | 14662 | | | | | | |
| | 14720 | 14735 | | | | | | |
| | 14793 | 14808 | | | | | | |
| | 14939 | 14954 | | | | | | |
| | 15012 | 15027 | | | | | | |
| | 15085 | 15100 | | | | | | |
| 1300642 | 26789 | 26804 | N/A | N/A | TATGCCCCAATCGATA | 54 | AN | 2688 |
| 1300677 | 29461 | 29476 | N/A | N/A | GTCAAATTAAGCCCAT | 57 | AN | 168 |
| 1300693 | 25740 | 25755 | N/A | N/A | AATTGAGAGGTATATG | 71 | AN | 2543 |
| 1232737 | 5138 | 5153 | 90 | 105 | ATGCCATCTTGACCCA | 55 | AO | 22 |
| 1300265 | 26961 | 26976 | N/A | N/A | CTCGACTGATTAATGC | 71 | AO | 2544 |
| 1300274 | 6015 | 6030 | 967 | 982 | TTGATCGCAGCGAAGA | 75 | AO | 2029 |
| 1300288 | 27363 | 27378 | N/A | N/A | TTTAGGACCGTCCCCC | 67 | AO | 2569 |
| 1300318 | 5145 | 5160 | 97 | 112 | CTTCACGATGCCATCT | 45 | AO | 253 |
| 1300333 | 11235 | 11250 | 1538 | 1553 | CTGTGTCACAAGGCTC | 33 | AO | 1572 |
| 1300341 | 11263 | 11278 | 1566 | 1581 | AGCTCATGATCAGGTC | 63 | AO | 2535 |
| 1300355 | 11952 | 11967 | 2255 | 2270 | GAACAGGTTCATCCTC | 81 | AO | 34 |
| 1300358 | 5151 | 5166 | 103 | 118 | CAACCACTTCACGATG | 57 | AO | 946 |
| 1300372 | 12461 | 12476 | 2764 | 2779 | GACTCCACCCGATGAC | 83 | AO | 2695 |
| 1300376 | 11983 | 11998 | 2286 | 2301 | TGTAGAACTTCTCGCA | 38 | AO | 2685 |
| 1300389 | 12487 | 12502 | 2790 | 2805 | TGTTATGGAGAAACCC | 54 | AO | 576 |
| 1300410 | 14574 | 14589 | N/A | N/A | AGGTGCCATCTAGAGG | 29 | AO | 1528 |
| | 14866 | 14881 | | | | | | |
| | 15156 | 15171 | | | | | | |
| | 15229 | 15244 | | | | | | |
| 1300447 | 17668 | 17683 | N/A | N/A | AATATATCGAGCATCA | 24 | AO | 606 |
| 1300479 | 23303 | 23318 | N/A | N/A | ATCTTATTAGCAGCAG | 36 | AO | 76 |
| 1300490 | 23532 | 23547 | N/A | N/A | TCTCCTAGTGTAGAGG | 87 | AO | 2549 |
| 1300505 | 23033 | 23048 | 3308 | 3323 | TCTGGTCAGGGAATGG | 53 | AO | 1662 |
| 1300506 | 25166 | 25181 | N/A | N/A | TGTACGACCTATAAGG | 91 | AO | 2697 |
| 1300531 | 12138 | 12153 | 2441 | 2456 | CTTTTCGAATTTGCCA | 44 | AO | 343 |
| 1300565 | 19882 | 19897 | N/A | N/A | TTGATTAGTTTCCCCG | 32 | AO | 1687 |
| 1300569 | 12145 | 12160 | 2448 | 2463 | AATACCCCTTTTCGAA | 58 | AO | 36 |
| 1300595 | 12453 | 12468 | 2756 | 2771 | CCGATGACAGTTCTCA | 29 | AO | 2118 |
| 1300620 | 23820 | 23835 | N/A | N/A | GATTATTAGTGGGTAT | 42 | AO | 616 |
| 1300634 | 25075 | 25090 | N/A | N/A | CGCTCTGTTTGTGATA | 40 | AO | 2699 |
| 1300648 | 26783 | 26798 | N/A | N/A | CCAATCGATAGATCTA | 49 | AO | 2541 |
| 1300663 | 28760 | 28775 | N/A | N/A | AACTATTAAGCAACGG | 55 | AO | 628 |
| 1300682 | 31079 | 31094 | 3523 | 3538 | AGTTTGATCCCCTTGT | 56 | AO | 1743 |
| 1300689 | 31016 | 31031 | 3460 | 3475 | GTGCTGAGTACCGAGG | 38 | AO | 895 |
| 1300710 | 25817 | 25832 | N/A | N/A | GTTTACACCAAGCATG | 55 | AO | 2571 |
| 1232737 | 5138 | 5153 | 90 | 105 | ATGCCATCTTGACCCA | 65 | AP | 22 |
| 1300275 | 27134 | 27149 | N/A | N/A | ATGTAGCTATACCTAA | 103 | AP | 2551 |
| 1300294 | 27369 | 27384 | N/A | N/A | AGAGCATTTAGGACCG | 55 | AP | 2572 |
| 1300308 | 10301 | 10316 | 1101 | 1116 | GGTACTCCAGTAAACC | 80 | AP | 2694 |
| 1300323 | 11011 | 11026 | 1314 | 1329 | TCTTGGTCTTGCCGAT | 71 | AP | 2702 |
| 1300330 | 11005 | 11020 | 1308 | 1323 | TCTTGCCGATGGCCAG | 87 | AP | 2691 |
| 1300390 | 12486 | 12501 | 2789 | 2804 | GTTATGGAGAAACCCC | 25 | AP | 887 |
| 1300399 | 5171 | 5186 | 123 | 138 | GTATTACAGTTTACGG | 56 | AP | 178 |
| 1300413 | 14681 | 14696 | N/A | N/A | GGGCTCCAATCAGAGT | 94 | AP | 2145 |
| | 14827 | 14842 | | | | | | |
| | 14973 | 14988 | | | | | | |
| 1300435 | 17662 | 17677 | N/A | N/A | TCGAGCATCATGGTTG | 42 | AP | 2547 |
| 1300476 | 11045 | 11060 | 1348 | 1363 | TCCATCTTAATGGGAC | 84 | AP | 2693 |
| 1300553 | 18860 | 18875 | N/A | N/A | ACTGTGCAGTAACATA | 70 | AP | 2700 |
| 1300556 | 12144 | 12159 | 2447 | 2462 | ATACCCCTTTTCGAAT | 82 | AP | 2347 |
| 1300574 | 20416 | 20431 | N/A | N/A | TGAAGCGGGCGGTGTG | 82 | AP | 2579 |
| 1300578 | 20274 | 20289 | N/A | N/A | GACGATTTCATCCCAG | 20 | AP | 1918 |
| 1300585 | 20590 | 20605 | N/A | N/A | TACACCTGACCAGAGA | 42 | AP | 2587 |
| 1300624 | 25020 | 25035 | N/A | N/A | AGTAACTACATAGAGC | 46 | AP | 465 |
| 1300639 | 25074 | 25089 | N/A | N/A | GCTCTGTTTGTGATAC | 49 | AP | 2389 |
| | 26262 | 26277 | | | | | | |
| 1232737 | 5138 | 5153 | 90 | 105 | ATGCCATCTTGACCCA | 59 | AQ | 22 |
| 1300270 | 26960 | 26975 | N/A | N/A | TCGACTGATTAATGCC | 45 | AQ | 2558 |
| 1300291 | 6022 | 6037 | 974 | 989 | TCTCCTGTTGATCGCA | 40 | AQ | 721 |
| 1300307 | 5143 | 5158 | 95 | 110 | TCACGATGCCATCTTG | 45 | AQ | 2332 |
| 1300321 | 11004 | 11019 | 1307 | 1322 | CTTGCCGATGGCCAGA | 86 | AQ | 2703 |
| 1300363 | 11982 | 11997 | 2285 | 2300 | GTAGAACTTCTCGCAG | 69 | AQ | 2583 |
| 1300370 | 11976 | 11991 | 2279 | 2294 | CTTCTCGCAGTCCACT | 34 | AQ | 2704 |
| 1300381 | 12704 | 12719 | N/A | N/A | TATGATGTAGCTGTGG | 54 | AQ | 678 |
| 1300406 | 14590 | 14605 | N/A | N/A | GTCCTCAGAGTAAGGC | 58 | AQ | 759 |
| | 14882 | 14897 | | | | | | |
| | 15172 | 15187 | | | | | | |
| | 15245 | 15260 | | | | | | |
| 1300420 | 16733 | 16748 | 3051 | 3066 | TCCGAATGTTACAGCC | 59 | AQ | 578 |
| 1300422 | 15112 | 15127 | N/A | N/A | CCAGTCAGAGTCTGTC | 32 | AQ | 991 |
| | 15258 | 15273 | | | | | | |
| 1300427 | 16645 | 16660 | 2963 | 2978 | AGTTAGACTCTGGCTG | 65 | AQ | 1351 |
| 1300442 | 17675 | 17690 | N/A | N/A | GAAATGGAATATATCG | 65 | AQ | 1608 |
| 1300446 | 17667 | 17682 | N/A | N/A | ATATATCGAGCATCAT | 60 | AQ | 529 |
| 1300466 | 21604 | 21619 | N/A | N/A | TCTTATACAATATGAG | 65 | AQ | 305 |
| 1300487 | 23498 | 23513 | N/A | N/A | TTCCTAGTGTAGAGGC | 56 | AQ | 2696 |
| 1300488 | 23531 | 23546 | N/A | N/A | CTCCTAGTGTAGAGGC | 102 | AQ | 2561 |
| 1300507 | 23007 | 23022 | 3282 | 3297 | ATACTGATGCAAGATC | 55 | AQ | 738 |
| 1300547 | 18759 | 18774 | N/A | N/A | AGCATTTAAGCCACCG | 40 | AQ | 1224 |
| 1300557 | 19469 | 19484 | N/A | N/A | GATGAAGAGTGTGATC | 72 | AQ | 2578 |
| 1300576 | 20273 | 20288 | N/A | N/A | ACGATTTCATCCCAGC | 24 | AQ | 2594 |
| 1300588 | 20422 | 20437 | N/A | N/A | TGTAAGTGAAGCGGGC | 52 | AQ | 2580 |
| 1300599 | 12452 | 12467 | 2755 | 2770 | CGATGACAGTTCTCAA | 55 | AQ | 2426 |
| 1300628 | 23827 | 23842 | N/A | N/A | AGTGCATGATTATTAG | 72 | AQ | 2698 |
| 1300641 | 14504 | 14519 | N/A | N/A | GGAAGGTGCTATCTAG | 33 | AQ | 1835 |
| | 14650 | 14665 | | | | | | |
| | 14723 | 14738 | | | | | | |
| | 14796 | 14811 | | | | | | |
| | 14942 | 14957 | | | | | | |
| | 15015 | 15030 | | | | | | |
| | 15088 | 15103 | | | | | | |
| 1300644 | 26787 | 26802 | N/A | N/A | TGCCCCAATCGATAGA | 89 | AQ | 2596 |
| 1300654 | 26972 | 26987 | N/A | N/A | TGCATAAAAGTCTCGA | 58 | AQ | 1469 |
| 1300681 | 31015 | 31030 | 3459 | 3474 | TGCTGAGTACCGAGGA | 51 | AQ | 818 |
| 1300684 | 31077 | 31092 | 3521 | 3536 | TTTGATCCCCTTGTCT | 77 | AQ | 1589 |
| 1300701 | 26600 | 26615 | N/A | N/A | TATTTGGTGATACGGT | 26 | AQ | 2568 |
| 1232737 | 5138 | 5153 | 90 | 105 | ATGCCATCTTGACCCA | 65 | AR | 22 |
| 1300282 | 27200 | 27215 | N/A | N/A | CAGTATTGAGACAGGC | 47 | AR | 2582 |
| 1300312 | 10923 | 10938 | 1226 | 1241 | GTTGAGGCTCACACTC | 73 | AR | 1340 |
| 1300338 | 11233 | 11248 | 1536 | 1551 | GTGTCACAAGGCTCAC | 79 | AR | 1418 |
| 1300343 | 11299 | 11314 | 1602 | 1617 | CGATCTTGTGGATGGG | 41 | AR | 2343 |
| 1300379 | 12460 | 12475 | 2763 | 2778 | ACTCCACCCGATGACA | 60 | AR | 2706 |
| 1300436 | 5293 | 5308 | 245 | 260 | AGTTAGCCAAATGCTT | 72 | AR | 410 |
| 1300456 | 20704 | 20719 | N/A | N/A | GAGAGCTCCGGAATAG | 61 | AR | 842 |
| | 20746 | 20761 | | | | | | |
| | 20914 | 20929 | | | | | | |
| 1300471 | 23301 | 23316 | N/A | N/A | CTTATTAGCAGCAGTA | 39 | AR | 845 |
| 1300496 | 25159 | 25174 | N/A | N/A | CCTATAAGGACCCAGC | 56 | AR | 542 |
| 1300512 | 17445 | 17460 | N/A | N/A | GATTAACATTAGGTCT | 45 | AR | 144 |
| 1300515 | 23043 | 23058 | 3318 | 3333 | CCACATAGAGTCTGGT | 79 | AR | 582 |
| 1300537 | 18354 | 18369 | N/A | N/A | GCGGACTTTAACACTT | 67 | AR | 2586 |
| 1300601 | 22895 | 22910 | N/A | N/A | GGAAGCACCCGTACCT | 96 | AR | 2708 |
| 1300613 | 22901 | 22916 | N/A | N/A | GGACAAGGAAGCACCC | 75 | AR | 2605 |
| 1300622 | 23825 | 23840 | N/A | N/A | TGCATGATTATTAGTG | 69 | AR | 2606 |
| 1300632 | 25038 | 25053 | N/A | N/A | AGGTTAGGTATTGACA | 46 | AR | 2595 |
| 1300650 | 26782 | 26797 | N/A | N/A | CAATCGATAGATCTAC | 46 | AR | 391 |
| 1232737 | 5138 | 5153 | 90 | 105 | ATGCCATCTTGACCCA | 55 | AS | 22 |
| 1300271 | 27132 | 27147 | N/A | N/A | GTAGCTATACCTAACA | 67 | AS | 2701 |
| 1300286 | 27362 | 27377 | N/A | N/A | TTAGGACCGTCCCCCG | 131 | AS | 2714 |
| 1300293 | 6021 | 6036 | 973 | 988 | CTCCTGTTGATCGCAG | 65 | AS | 644 |
| 1300309 | 10300 | 10315 | 1100 | 1115 | GTACTCCAGTAAACCC | 67 | AS | 2031 |
| 1300347 | 5150 | 5165 | 102 | 117 | AACCACTTCACGATGC | 71 | AS | 871 |
| 1300350 | 11262 | 11277 | 1565 | 1580 | GCTCATGATCAGGTCC | 44 | AS | 2111 |
| 1300357 | 11948 | 11963 | 2251 | 2266 | AGGTTCATCCTCAGGA | 94 | AS | 729 |
| 1300424 | 15111 | 15126 | N/A | N/A | CAGTCAGAGTCTGTCC | 12 | AS | 914 |
| | 15257 | 15272 | | | | | | |
| 1300425 | 16644 | 16659 | 2962 | 2977 | GTTAGACTCTGGCTGG | 52 | AS | 1274 |
| 1300439 | 15187 | 15202 | N/A | N/A | CTCCCGTCAGAGTCTG | 87 | AS | 2570 |
| 1300501 | 25164 | 25179 | N/A | N/A | TACGACCTATAAGGAC | 88 | AS | 2603 |
| 1300518 | 23041 | 23056 | 3316 | 3331 | ACATAGAGTCTGGTCA | 97 | AS | 505 |
| 1300538 | 17988 | 18003 | N/A | N/A | CCCATACAAAGCATTC | 66 | AS | 2576 |
| 1300617 | 23817 | 23832 | N/A | N/A | TATTAGTGGGTATTCC | 79 | AS | 462 |
| 1300625 | 25019 | 25034 | N/A | N/A | GTAACTACATAGAGCA | 33 | AS | 2466 |
| 1300643 | 26781 | 26796 | N/A | N/A | AATCGATAGATCTACA | 58 | AS | 314 |
| 1300651 | 27025 | 27040 | N/A | N/A | ATAGGCTATACCTAAC | 105 | AS | 316 |
| | 27061 | 27076 | | | | | | |
| | 27097 | 27112 | | | | | | |
| | 27115 | 27130 | | | | | | |
| 1300658 | 26971 | 26986 | N/A | N/A | GCATAAAAGTCTCGAC | 51 | AS | 623 |
| 1300661 | 28759 | 28774 | N/A | N/A | ACTATTAAGCAACGGT | 49 | AS | 551 |
| 1300669 | 27027 | 27042 | N/A | N/A | CCATAGGCTATACCTA | 47 | AS | 470 |
| | 27063 | 27078 | | | | | | |
| 1300678 | 29459 | 29474 | N/A | N/A | CAAATTAAGCCCATTC | 74 | AS | 2013 |
| 1232737 | 5138 | 5153 | 90 | 105 | ATGCCATCTTGACCCA | 57 | AT | 22 |
| 1300272 | 27199 | 27214 | N/A | N/A | AGTATTGAGACAGGCA | 43 | AT | 2622 |
| 1300324 | 11010 | 11025 | 1313 | 1328 | CTTGGTCTTGCCGATG | 70 | AT | 2715 |
| 1300344 | 11298 | 11313 | 1601 | 1616 | GATCTTGTGGATGGGT | 39 | AT | 2600 |
| 1300348 | 11261 | 11276 | 1564 | 1579 | CTCATGATCAGGTCCC | 59 | AT | 2419 |
| 1300383 | 5170 | 5185 | 122 | 137 | TATTACAGTTTACGGT | 54 | AT | 101 |
| 1300455 | 21594 | 21609 | N/A | N/A | TATGAGGACCCAGGGC | 89 | AT | 2574 |
| 1300467 | 21603 | 21618 | N/A | N/A | CTTATACAATATGAGG | 80 | AT | 843 |
| 1300472 | 23493 | 23508 | N/A | N/A | AGTGTAGAGGCTGCAT | 24 | AT | 2716 |
| 1300473 | 11044 | 11059 | 1347 | 1362 | CCATCTTAATGGGACT | 62 | AT | 2585 |
| 1300523 | 12137 | 12152 | 2440 | 2455 | TTTTCGAATTTGCCAT | 54 | AT | 2192 |
| 1300548 | 18758 | 18773 | N/A | N/A | GCATTTAAGCCACCGA | 47 | AT | 1147 |
| 1300589 | 20421 | 20436 | N/A | N/A | GTAAGTGAAGCGGGCG | 33 | AT | 2072 |
| 1300593 | 12451 | 12466 | 2754 | 2769 | GATGACAGTTCTCAAT | 106 | AT | 2041 |
| 1300676 | 5141 | 5156 | 93 | 108 | ACGATGCCATCTTGAC | 44 | AT | 2254 |
| 1300699 | 31084 | 31099 | 3528 | 3543 | AGAGTAGTTTGATCCC | 62 | AT | 2589 |
| 1232737 | 5138 | 5153 | 90 | 105 | ATGCCATCTTGACCCA | 52 | AU | 22 |
| 1300292 | 27368 | 27383 | N/A | N/A | GAGCATTTAGGACCGT | 29 | AU | 1393 |
| 1300306 | 10297 | 10312 | 1097 | 1112 | CTCCAGTAAACCCATC | 67 | AU | 1877 |
| 1300311 | 10883 | 10898 | 1186 | 1201 | TCAATGCACTGGAATC | 52 | AU | 2032 |
| 1300315 | 11003 | 11018 | 1306 | 1321 | TTGCCGATGGCCAGAA | 73 | AU | 2718 |
| 1300331 | 11232 | 11247 | 1535 | 1550 | TGTCACAAGGCTCACC | 68 | AU | 2710 |
| 1300364 | 11981 | 11996 | 2284 | 2299 | TAGAACTTCTCGCAGT | 60 | AU | 2623 |
| 1300367 | 11975 | 11990 | 2278 | 2293 | TTCTCGCAGTCCACTT | 78 | AU | 2705 |
| 1300385 | 12703 | 12718 | N/A | N/A | ATGATGTAGCTGTGGC | 26 | AU | 2625 |
| 1300419 | 16732 | 16747 | 3050 | 3065 | CCGAATGTTACAGCCA | 69 | AU | 501 |
| 1300445 | 17673 | 17688 | N/A | N/A | AATGGAATATATCGAG | 34 | AU | 222 |
| 1300448 | 17666 | 17681 | N/A | N/A | TATATCGAGCATCATG | 27 | AU | 452 |
| 1300462 | 21600 | 21615 | N/A | N/A | ATACAATATGAGGACC | 55 | AU | 689 |
| 1300504 | 23006 | 23021 | 3281 | 3296 | TACTGATGCAAGATCC | 58 | AU | 661 |
| 1300513 | 17443 | 17458 | N/A | N/A | TTAACATTAGGTCTTG | 16 | AU | 2638 |
| 1300527 | 12136 | 12151 | 2439 | 2454 | TTTCGAATTTGCCATA | 47 | AU | 266 |
| 1300552 | 19273 | 19288 | N/A | N/A | TGATAGACACTAGAGC | 39 | AU | 2613 |
| 1300555 | 12143 | 12158 | 2446 | 2461 | TACCCCTTTTCGAATT | 80 | AU | 2614 |
| 1300558 | 18859 | 18874 | N/A | N/A | CTGTGCAGTAACATAT | 54 | AU | 2707 |
| 1300566 | 19881 | 19896 | N/A | N/A | TGATTAGTTTCCCCGT | 49 | AU | 2577 |
| 1300580 | 20272 | 20287 | N/A | N/A | CGATTTCATCCCAGCC | 22 | AU | 2615 |
| 1300604 | 22431 | 22446 | N/A | N/A | GCATAATGTCCCCGAG | 41 | AU | 536 |
| 1300653 | 27024 | 27039 | N/A | N/A | TAGGCTATACCTAACA | 51 | AU | 239 |
| | 27060 | 27075 | | | | | | |
| | 27096 | 27111 | | | | | | |
| | 27114 | 27129 | | | | | | |
| 1300685 | 31022 | 31037 | 3466 | 3481 | TGATTAGTGCTGAGTA | 27 | AU | 1280 |
| 1300708 | 26599 | 26614 | N/A | N/A | ATTTGGTGATACGGTT | 35 | AU | 2709 |
| 1232737 | 5138 | 5153 | 90 | 105 | ATGCCATCTTGACCCA | 43 | AV | 22 |
| 1300266 | 26959 | 26974 | N/A | N/A | CGACTGATTAATGCCA | 27 | AV | 2713 |
| 1300278 | 27131 | 27146 | N/A | N/A | TAGCTATACCTAACAC | 86 | AV | 2634 |
| 1300320 | 10880 | 10895 | 1183 | 1198 | ATGCACTGGAATCTGC | 63 | AV | 1801 |
| 1300337 | 5149 | 5164 | 101 | 116 | ACCACTTCACGATGCC | 47 | AV | 792 |
| 1300361 | 11974 | 11989 | 2277 | 2292 | TCTCGCAGTCCACTTC | 80 | AV | 2720 |
| 1300382 | 12466 | 12481 | 2769 | 2784 | ACAGTGACTCCACCCG | 28 | AV | 656 |
| 1300400 | 14476 | 14491 | N/A | N/A | TGAGCCTCCTACCGGG | 77 | AV | 2142 |
| | 14622 | 14637 | | | | | | |
| | 14768 | 14783 | | | | | | |
| | 14914 | 14929 | | | | | | |
| | 15060 | 15075 | | | | | | |
| 1300430 | 5290 | 5305 | 242 | 257 | TAGCCAAATGCTTACC | 72 | AV | 1948 |
| 1300437 | 17660 | 17675 | N/A | N/A | GAGCATCATGGTTGTT | 48 | AV | 2601 |
| 1300438 | 15185 | 15200 | N/A | N/A | CCCGTCAGAGTCTGTC | 35 | AV | 2711 |
| 1300443 | 20578 | 20593 | N/A | N/A | GAGAGCTCCGGAATAC | 63 | AV | 841 |
| | 20956 | 20971 | | | | | | |
| 1300458 | 20584 | 20599 | N/A | N/A | TGACCAGAGAGCTCCG | 57 | AV | 150 |
| | 20710 | 20725 | | | | | | |
| | 20752 | 20767 | | | | | | |
| | 20920 | 20935 | | | | | | |
| 1300491 | 23535 | 23550 | N/A | N/A | TCCTCTCCTAGTGTAG | 109 | AV | 2724 |
| 1300497 | 25158 | 25173 | N/A | N/A | CTATAAGGACCCAGCC | 79 | AV | 2592 |
| 1300549 | 18757 | 18772 | N/A | N/A | CATTTAAGCCACCGAA | 69 | AV | 224 |
| 1300577 | 20279 | 20294 | N/A | N/A | TGTTTGACGATTTCAT | 54 | AV | 2712 |
| 1300610 | 12457 | 12472 | 2760 | 2775 | CCACCCGATGACAGTT | 62 | AV | 2631 |
| 1300655 | 27021 | 27036 | N/A | N/A | GCTATACCTAACACAC | 27 | AV | 2598 |
| | 27057 | 27072 | | | | | | |
| 1300683 | 31020 | 31035 | 3464 | 3479 | ATTAGTGCTGAGTACC | 51 | AV | 1203 |
| 1300688 | 31014 | 31029 | 3458 | 3473 | GCTGAGTACCGAGGAC | 53 | AV | 741 |
| 1300702 | 25814 | 25829 | N/A | N/A | TACACCAAGCATGTGT | 112 | AV | 2607 |
| 1300706 | 26598 | 26613 | N/A | N/A | TTTGGTGATACGGTTA | 36 | AV | 2726 |
| 1232737 | 5138 | 5153 | 90 | 105 | ATGCCATCTTGACCCA | 65 | AW | 22 |
| 1300289 | 27206 | 27221 | N/A | N/A | CTTGAGCAGTATTGAG | 77 | AW | 2644 |
| 1300296 | 6020 | 6035 | 972 | 987 | TCCTGTTGATCGCAGC | 66 | AW | 2338 |
| 1300345 | 11297 | 11312 | 1600 | 1615 | ATCTTGTGGATGGGTG | 44 | AW | 2265 |
| 1300356 | 11947 | 11962 | 2250 | 2265 | GGTTCATCCTCAGGAA | 63 | AW | 652 |
| 1300407 | 5288 | 5303 | 240 | 255 | GCCAAATGCTTACCAG | 33 | AW | 333 |
| 1300432 | 17665 | 17680 | N/A | N/A | ATATCGAGCATCATGG | 110 | AW | 375 |
| 1300444 | 17672 | 17687 | N/A | N/A | ATGGAATATATCGAGC | 92 | AW | 145 |
| 1300451 | 20580 | 20595 | N/A | N/A | CAGAGAGCTCCGGAAT | 71 | AW | 918 |
| | 20706 | 20721 | | | | | | |
| | 20748 | 20763 | | | | | | |
| | 20916 | 20931 | | | | | | |
| | 20958 | 20973 | | | | | | |
| 1300461 | 11043 | 11058 | 1346 | 1361 | CATCTTAATGGGACTC | 43 | AW | 417 |
| 1300498 | 23502 | 23517 | N/A | N/A | CTCTTTCCTAGTGTAG | 84 | AW | 2611 |
| 1300503 | 23004 | 23019 | 3279 | 3294 | CTGATGCAAGATCCTG | 23 | AW | 2277 |
| 1300536 | 18353 | 18368 | N/A | N/A | CGGACTTTAACACTTG | 40 | AW | 2639 |
| 1300570 | 19880 | 19895 | N/A | N/A | GATTAGTTTCCCCGTC | 42 | AW | 1610 |
| 1300586 | 20426 | 20441 | N/A | N/A | GGTTTGTAAGTGAAGC | 31 | AW | 2659 |
| 1300591 | 20697 | 20712 | N/A | N/A | CCGGAATAGAGAAAGC | 74 | AW | 304 |
| | 20739 | 20754 | | | | | | |
| | 20907 | 20922 | | | | | | |
| | 20991 | 21006 | | | | | | |
| 1300592 | 21014 | 21029 | N/A | N/A | AGGACACACCTGATCA | 76 | AW | 2717 |
| 1300612 | 22900 | 22915 | N/A | N/A | GACAAGGAAGCACCCG | 90 | AW | 2076 |
| 1300630 | 5140 | 5155 | 92 | 107 | CGATGCCATCTTGACC | 31 | AW | 2177 |
| 1300646 | 26786 | 26801 | N/A | N/A | GCCCCAATCGATAGAT | 111 | AW | 2642 |
| 1300665 | 28758 | 28773 | N/A | N/A | CTATTAAGCAACGGTT | 96 | AW | 474 |
| 1300675 | 28765 | 28780 | N/A | N/A | CTGGTAACTATTAAGC | 66 | AW | 2597 |
| 1300700 | 31083 | 31098 | 3527 | 3542 | GAGTAGTTTGATCCCC | 46 | AW | 2051 |
| 1232737 | 5138 | 5153 | 90 | 105 | ATGCCATCTTGACCCA | 43 | AX | 22 |
| 1300325 | 11009 | 11024 | 1312 | 1327 | TTGGTCTTGCCGATGG | 57 | AX | 2719 |
| 1300334 | 11260 | 11275 | 1563 | 1578 | TCATGATCAGGTCCCC | 55 | AX | 2034 |
| 1300373 | 12465 | 12480 | 2768 | 2783 | CAGTGACTCCACCCGA | 29 | AX | 2350 |
| 1300387 | 5169 | 5184 | 121 | 136 | ATTACAGTTTACGGTG | 63 | AX | 1331 |
| 1300417 | 16731 | 16746 | 3049 | 3064 | CGAATGTTACAGCCAG | 57 | AX | 2353 |
| 1300428 | 16643 | 16658 | 2961 | 2976 | TTAGACTCTGGCTGGT | 44 | AX | 2608 |
| 1300459 | 20583 | 20598 | N/A | N/A | GACCAGAGAGCTCCGG | 51 | AX | 73 |
| | 20709 | 20724 | | | | | | |
| | 20751 | 20766 | | | | | | |
| | 20919 | 20934 | | | | | | |
| 1300468 | 21599 | 21614 | N/A | N/A | TACAATATGAGGACCC | 70 | AX | 228 |
| 1300514 | 23040 | 23055 | 3315 | 3330 | CATAGAGTCTGGTCAG | 49 | AX | 428 |
| 1300543 | 18858 | 18873 | N/A | N/A | TGTGCAGTAACATATC | 59 | AX | 2722 |
| 1300551 | 12142 | 12157 | 2445 | 2460 | ACCCCTTTTCGAATTT | 65 | AX | 2269 |
| 1300571 | 20277 | 20292 | N/A | N/A | TTTGACGATTTCATCC | 37 | AX | 2731 |
| 1300579 | 12449 | 12464 | 2752 | 2767 | TGACAGTTCTCAATGC | 71 | AX | 2727 |
| 1300597 | 20929 | 20944 | N/A | N/A | GAACACACCTGACCAG | 34 | AX | 1689 |
| | 21055 | 21070 | | | | | | |
| 1300621 | 23824 | 23839 | N/A | N/A | GCATGATTATTAGTGG | 53 | AX | 2633 |
| 1300627 | 25018 | 25033 | N/A | N/A | TAACTACATAGAGCAT | 57 | AX | 2616 |
| 1300638 | 25036 | 25051 | N/A | N/A | GTTAGGTATTGACAAT | 94 | AX | 2651 |
| 1300652 | 26970 | 26985 | N/A | N/A | CATAAAAGTCTCGACT | 84 | AX | 2619 |
| 1300656 | 27022 | 27037 | N/A | N/A | GGCTATACCTAACACA | 32 | AX | 162 |
| | 27058 | 27073 | | | | | | |
| | 27112 | 27127 | | | | | | |
| 1300670 | 27107 | 27122 | N/A | N/A | TACCTAACACATAGGC | 63 | AX | 2470 |
| | 27125 | 27140 | | | | | | |
| 1300671 | 31012 | 31027 | 3456 | 3471 | TGAGTACCGAGGACAA | 64 | AX | 2358 |
| 1300694 | 31082 | 31097 | 3526 | 3541 | AGTAGTTTGATCCCCT | 45 | AX | 1974 |
| 1232737 | 5138 | 5153 | 90 | 105 | ATGCCATCTTGACCCA | 69 | AY | 22 |
| 1300261 | 26958 | 26973 | N/A | N/A | GACTGATTAATGCCAC | 34 | AY | 2620 |
| 1300273 | 27198 | 27213 | N/A | N/A | GTATTGAGACAGGCAG | 45 | AY | 854 |
| 1300277 | 27130 | 27145 | N/A | N/A | AGCTATACCTAACACA | 54 | AY | 2239 |
| 1300299 | 27367 | 27382 | N/A | N/A | AGCATTTAGGACCGTC | 34 | AY | 1316 |
| 1300303 | 10295 | 10310 | 1095 | 1110 | CCAGTAAACCCATCCA | 40 | AY | 1723 |
| 1300327 | 11008 | 11023 | 1311 | 1326 | TGGTCTTGCCGATGGC | 61 | AY | 2033 |
| 1300336 | 5148 | 5163 | 100 | 115 | CCACTTCACGATGCCA | 39 | AY | 407 |
| 1300352 | 11973 | 11988 | 2276 | 2291 | CTCGCAGTCCACTTCC | 69 | AY | 868 |
| 1300365 | 11980 | 11995 | 2283 | 2298 | AGAACTTCTCGCAGTC | 57 | AY | 2723 |
| 1300384 | 12702 | 12717 | N/A | N/A | TGATGTAGCTGTGGCA | 41 | AY | 2654 |
| 1300440 | 15184 | 15199 | N/A | N/A | CCGTCAGAGTCTGTCC | 26 | AY | 2721 |
| 1300441 | 17671 | 17686 | N/A | N/A | TGGAATATATCGAGCA | 19 | AY | 1454 |
| 1300460 | 20582 | 20597 | N/A | N/A | ACCAGAGAGCTCCGGA | 40 | AY | 611 |
| | 20708 | 20723 | | | | | | |
| | 20750 | 20765 | | | | | | |
| | 20918 | 20933 | | | | | | |
| 1300463 | 23282 | 23297 | N/A | N/A | ATTATATGCCTCCAGT | 50 | AY | 2626 |
| 1300469 | 11042 | 11057 | 1345 | 1360 | ATCTTAATGGGACTCA | 47 | AY | 340 |
| 1300480 | 23492 | 23507 | N/A | N/A | GTGTAGAGGCTGCATG | 42 | AY | 2610 |
| 1300494 | 25163 | 25178 | N/A | N/A | ACGACCTATAAGGACC | 79 | AY | 2657 |
| 1300511 | 17441 | 17456 | N/A | N/A | AACATTAGGTCTTGTG | 64 | AY | 684 |
| 1300520 | 23039 | 23054 | 3314 | 3329 | ATAGAGTCTGGTCAGG | 60 | AY | 351 |
| 1300532 | 17703 | 17718 | N/A | N/A | ACTCTCATCTATGAAC | 58 | AY | 2725 |
| 1300540 | 18352 | 18367 | N/A | N/A | GGACTTTAACACTTGC | 34 | AY | 2665 |
| 1300581 | 20420 | 20435 | N/A | N/A | TAAGTGAAGCGGGCGG | 81 | AY | 2630 |
| 1300602 | 20698 | 20713 | N/A | N/A | TCCGGAATAGAGAAAG | 97 | AY | 381 |
| | 20740 | 20755 | | | | | | |
| | 20908 | 20923 | | | | | | |
| | 20992 | 21007 | | | | | | |
| 1300649 | 26779 | 26794 | N/A | N/A | TCGATAGATCTACACA | 43 | AY | 2617 |
| 1300664 | 28757 | 28772 | N/A | N/A | TATTAAGCAACGGTTA | 69 | AY | 1549 |
| 1300668 | 27111 | 27126 | N/A | N/A | GCTATACCTAACACAT | 34 | AY | 2162 |
| | 27129 | 27144 | | | | | | |
| 1232737 | 5138 | 5153 | 90 | 105 | ATGCCATCTTGACCCA | 63 | AZ | 22 |
| 1300314 | 11001 | 11016 | 1304 | 1319 | GCCGATGGCCAGAAGC | 105 | AZ | 2621 |
| 1300339 | 11231 | 11246 | 1534 | 1549 | GTCACAAGGCTCACCT | 81 | AZ | 2624 |
| 1300346 | 11296 | 11311 | 1599 | 1614 | TCTTGTGGATGGGTGG | 42 | AZ | 2188 |
| 1300351 | 11304 | 11319 | 1607 | 1622 | TCTCACGATCTTGTGG | 89 | AZ | 882 |
| 1300388 | 5168 | 5183 | 120 | 135 | TTACAGTTTACGGTGA | 90 | AZ | 24 |
| 1300401 | 14573 | 14588 | N/A | N/A | GGTGCCATCTAGAGGG | 87 | AZ | 1451 |
| | 14865 | 14880 | | | | | | |
| | 15155 | 15170 | | | | | | |
| | 15228 | 15243 | | | | | | |
| 1300408 | 14577 | 14592 | N/A | N/A | GGCAGGTGCCATCTAG | 50 | AZ | 1759 |
| | 14869 | 14884 | | | | | | |
| | 15159 | 15174 | | | | | | |
| | 15232 | 15247 | | | | | | |
| 1300411 | 16730 | 16745 | 3048 | 3063 | GAATGTTACAGCCAGG | 30 | AZ | 2275 |
| 1300477 | 23494 | 23509 | N/A | N/A | TAGTGTAGAGGCTGCA | 11 | AZ | 538 |
| | 23527 | 23542 | | | | | | |
| 1300495 | 23534 | 23549 | N/A | N/A | CCTCTCCTAGTGTAGA | 121 | AZ | 2732 |
| 1300500 | 23501 | 23516 | N/A | N/A | TCTTTCCTAGTGTAGA | 117 | AZ | 2635 |
| 1300508 | 23002 | 23017 | 3277 | 3292 | GATGCAAGATCCTGAC | 52 | AZ | 2123 |
| 1300525 | 12135 | 12150 | 2438 | 2453 | TTCGAATTTGCCATAG | 57 | AZ | 189 |
| 1300528 | 17449 | 17464 | N/A | N/A | ACTAGATTAACATTAG | 85 | AZ | 992 |
| 1300568 | 19879 | 19894 | N/A | N/A | ATTAGTTTCCCCGTCA | 25 | AZ | 2647 |
| 1300605 | 12456 | 12471 | 2759 | 2774 | CACCCGATGACAGTTC | 64 | AZ | 345 |
| 1300607 | 22430 | 22445 | N/A | N/A | CATAATGTCCCCGAGG | 68 | AZ | 2632 |
| 1300608 | 20701 | 20716 | N/A | N/A | AGCTCCGGAATAGAGA | 96 | AZ | 612 |
| | 20743 | 20758 | | | | | | |
| | 20911 | 20926 | | | | | | |
| | 20995 | 21010 | | | | | | |
| 1300709 | 25746 | 25761 | N/A | N/A | TGTTGAAATTGAGAGG | 60 | AZ | 2728 |
| 1300711 | 26603 | 26618 | N/A | N/A | CCTTATTTGGTGATAC | 39 | AZ | 1314 |

### Example 5: Effect of Mixed cEt and 2′-OMe, Uniform Phosphorothioate Modified Oligonucleotides on Human NLRP3 RNA In Vitro, Single Dose

[0345] Modified oligonucleotides complementary to human NLRP3 nucleic acid were designed and tested for their single dose effects on NLRP3 RNA in vitro. The modified oligonucleotides were tested in a series of experiments that had the same culture conditions.

[0346] The modified oligonucleotides in the table below are 16 nucleosides in length, wherein the sugar motif for the modified oligonucleotides is (from 5′ to 3′): kkkdyddddddddkkk; wherein each “d” represents a 2′-β-D-deoxyribosyl sugar moiety, each “y” represents a 2′-O-methylribose (2′-OMe) sugar moiety, and each “k” represents a cEt sugar moiety. The internucleoside linkage motif for the modified oligonucleotides is (from 5′ to 3′): sssssssssssssss; wherein each “s” represents a phosphorothioate internucleoside linkage. Each cytosine residue is a 5-methyl cytosine unless otherwise marked; non-methylated cytosine residues are indicated by a bolded and underlined C.

[0347] “Start site” indicates the 5′-most nucleoside to which the modified oligonucleotide is complementary in the target nucleic acid sequence. “Stop site” indicates the 3′-most nucleoside to which the modified oligonucleotide is complementary in the target nucleic acid sequence. Each modified oligonucleotide listed in the tables below is 100% complementary to SEQ ID NO: 1 (described herein above), to SEQ ID NO: 2 (described herein above), or to both. “N/A” indicates that the modified oligonucleotide is not 100% complementary to that particular target nucleic acid sequence.

[0348] Cultured THP-1 cells were treated with modified oligonucleotide at a concentration of 2000 nM by electroporation at a density of 300,000 cells per well. After a treatment period of approximately 24 hours, total RNA was isolated from the cells and NLRP3 RNA levels were measured by quantitative real-time RTPCR. NLRP3 RNA levels were measured by human primer-probe set RTS37509 (described herein above). NLRP3 RNA levels were normalized to total RNA content, as measured by RIBOGREEN®. Reduction of NLRP3 RNA is presented in the tables below as percent NLRP3 RNA relative to the amount of NLRP3 RNA in untreated control cells (% UTC).

[0349] Each separate experimental analysis described in this example is identified by a letter ID in the table column below labeled “AID” (Analysis ID). In the table below, Compound Nos. 1232737 and 1233176 (described herein above) were used as benchmark compounds.

TABLE 7
Reduction of NLRP3 RNA by modified oligonucleotides with a mixed cEt/2′-OMe sugar motif and
uniform phosphorothioate internucleoside linkages at a concentration of 2000 nM in THP-1
cells

| | SEQ | SEQ | SEQ | SEQ | | | | |
|---|---|---|---|---|---|---|---|---|
| | ID | ID | ID | ID | | | | |
| | No: 1 | No: 1 | No: 2 | No: 2 | | NLRP3 | | |
| Compound | Start | Stop | Start | Stop | | (% | | SEQ ID |
| Number | Site | Site | Site | Site | Sequence (5′ to 3′) | UTC) | AID | NO |
| 1232737 | 5138 | 5153 | 90 | 105 | ATGCCATCTTGACCCA | 59 | BA | 22 |
| 1233176 | 23496 | 23511 | N/A | N/A | CCTAGTGTAGAGGCTG | 30 | BA | 77 |
| | 23529 | 23544 | | | | | | |
| 1304679 | 20936 | 20951 | N/A | N/A | AGCAUCAGAACACACC | 35 | BA | 2734 |
| | 21062 | 21077 | | | | | | |
| 1304683 | 25074 | 25089 | N/A | N/A | GCTCUGTTTGTGATAC | 52 | BA | 2735 |
| | 26262 | 26277 | | | | | | |
| 1304684 | 23005 | 23020 | 3280 | 3295 | ACTGATGCAAGATCCT | 41 | BA | 2355 |
| 1304686 | 20641 | 20656 | N/A | N/A | GCATCAGGACACACCT | 26 | BA | 2304 |
| | 20683 | 20698 | | | | | | |
| | 20725 | 20740 | | | | | | |
| | 20767 | 20782 | | | | | | |
| | 20809 | 20824 | | | | | | |
| | 20851 | 20866 | | | | | | |
| | 21019 | 21034 | | | | | | |
| 1304689 | 14587 | 14602 | N/A | N/A | CTCAGAGTAAGGCAGG | 24 | BA | 2298 |
| | 14879 | 14894 | | | | | | |
| | 15169 | 15184 | | | | | | |
| | 15242 | 15257 | | | | | | |
| 1304692 | 5244 | 5259 | 196 | 211 | GTGTGTCCTGAGCCAT | 62 | BA | 2101 |
| 1304694 | 23284 | 23299 | N/A | N/A | ACATUATATGCCTCCA | 45 | BA | 2736 |
| 1304695 | 11008 | 11023 | 1311 | 1326 | TGGTCTTGCCGATGGC | 68 | BA | 2033 |
| 1304697 | 20421 | 20436 | N/A | N/A | GTAAGTGAAGCGGGCG | 45 | BA | 2072 |
| 1304700 | 14576 | 14591 | N/A | N/A | GCAGGTGCCATCTAGA | 82 | BA | 1682 |
| | 14868 | 14883 | | | | | | |
| | 15158 | 15173 | | | | | | |
| | 15231 | 15246 | | | | | | |
| 1304706 | 14575 | 14590 | N/A | N/A | CAGGUGCCATCTAGAG | 57 | BA | 2737 |
| | 14867 | 14882 | | | | | | |
| | 15157 | 15172 | | | | | | |
| | 15230 | 15245 | | | | | | |
| 1304707 | 14503 | 14518 | N/A | N/A | GAAGGTGCTATCTAGA | 29 | BA | 1758 |
| | 14649 | 14664 | | | | | | |
| | 14722 | 14737 | | | | | | |
| | 14795 | 14810 | | | | | | |
| | 14941 | 14956 | | | | | | |
| | 15014 | 15029 | | | | | | |
| | 15087 | 15102 | | | | | | |
| 1304708 | 11237 | 11252 | 1540 | 1555 | CTCTGTGTCACAAGGC | 46 | BA | 1726 |
| 1304709 | 14673 | 14688 | N/A | N/A | ATCAGAGTCTGTCCTC | 11 | BA | 1606 |
| | 14819 | 14834 | | | | | | |
| | 14965 | 14980 | | | | | | |
| 1304710 | 25745 | 25760 | N/A | N/A | GTTGAAATTGAGAGGT | 49 | BA | 1235 |
| 1304712 | 23495 | 23510 | N/A | N/A | CTAGUGTAGAGGCTGC | 46 | BA | 2738 |
| | 23528 | 23543 | | | | | | |
| 1304714 | 14676 | 14691 | N/A | N/A | CCAAUCAGAGTCTGTC | 57 | BA | 2739 |
| | 14822 | 14837 | | | | | | |
| | 14968 | 14983 | | | | | | |
| 1304716 | 12138 | 12153 | 2441 | 2456 | CTTTUCGAATTTGCCA | 38 | BA | 2740 |
| 1304718 | 20587 | 20602 | N/A | N/A | ACCTGACCAGAGAGCT | 43 | BA | 1226 |
| | 20629 | 20644 | | | | | | |
| | 20671 | 20686 | | | | | | |
| | 20713 | 20728 | | | | | | |
| | 20755 | 20770 | | | | | | |
| | 20797 | 20812 | | | | | | |
| | 20923 | 20938 | | | | | | |
| | 21049 | 21064 | | | | | | |
| 1304720 | 11006 | 11021 | 1309 | 1324 | GTCTUGCCGATGGCCA | 61 | BA | 2741 |
| 1304721 | 14505 | 14520 | N/A | N/A | AGGAAGGTGCTATCTA | 30 | BA | 1912 |
| | 14651 | 14666 | | | | | | |
| | 14724 | 14739 | | | | | | |
| | 14797 | 14812 | | | | | | |
| | 14943 | 14958 | | | | | | |
| | 15016 | 15031 | | | | | | |
| | 15089 | 15104 | | | | | | |
| 1304722 | 11978 | 11993 | 2281 | 2296 | AACTUCTCGCAGTCCA | 47 | BA | 2742 |
| 1304723 | 14481 | 14496 | N/A | N/A | GGTGCTGAGCCTCCTA | 36 | BA | 757 |
| | 14627 | 14642 | | | | | | |
| | 14773 | 14788 | | | | | | |
| | 15065 | 15080 | | | | | | |
| 1304724 | 15112 | 15127 | N/A | N/A | CCAGUCAGAGTCTGTC | 38 | BA | 2743 |
| | 15258 | 15273 | | | | | | |
| 1304731 | 14606 | 14621 | N/A | N/A | GCTTCAGTGAGAGTCT | 49 | BA | 1298 |
| | 14752 | 14767 | | | | | | |
| | 14898 | 14913 | | | | | | |
| | 15044 | 15059 | | | | | | |
| 1304732 | 12467 | 12482 | 2770 | 2785 | GACAGTGACTCCACCC | 30 | BA | 733 |
| 1304733 | 20634 | 20649 | N/A | N/A | GACACACCTGACCAGA | 43 | BA | 1996 |
| | 20676 | 20691 | | | | | | |
| | 20718 | 20733 | | | | | | |
| | 20760 | 20775 | | | | | | |
| | 20802 | 20817 | | | | | | |
| 1304734 | 25819 | 25834 | N/A | N/A | ATGTUTACACCAAGCA | 86 | BA | 2744 |
| 1304735 | 14491 | 14506 | N/A | N/A | TAGAGAAATGGGTGCT | 44 | BA | 988 |
| | 14637 | 14652 | | | | | | |
| | 14710 | 14725 | | | | | | |
| | 14783 | 14798 | | | | | | |
| | 15002 | 15017 | | | | | | |
| | 15075 | 15090 | | | | | | |
| 1304736 | 27367 | 27382 | N/A | N/A | AGCAUTTAGGACCGTC | 66 | BA | 2745 |
| 1304738 | 31082 | 31097 | 3526 | 3541 | AGTAGTTTGATCCCCT | 61 | BA | 1974 |
| 1304741 | 15312 | 15327 | N/A | N/A | AGAGUAAGGCAGCTGC | 61 | BA | 2746 |
| 1304743 | 14559 | 14574 | N/A | N/A | GGATGGGTGCTGAGCC | 48 | BA | 1143 |
| | 14851 | 14866 | | | | | | |
| | 15141 | 15156 | | | | | | |
| | 15214 | 15229 | | | | | | |
| 1304745 | 14493 | 14508 | N/A | N/A | TCTAGAGAAATGGGTG | 27 | BA | 1142 |
| | 14639 | 14654 | | | | | | |
| | 14712 | 14727 | | | | | | |
| | 14785 | 14800 | | | | | | |
| | 15004 | 15019 | | | | | | |
| | 15077 | 15092 | | | | | | |
| 1304747 | 25822 | 25837 | N/A | N/A | GATAUGTTTACACCAA | 39 | BA | 2747 |
| 1304749 | 17670 | 17685 | N/A | N/A | GGAAUATATCGAGCAT | 43 | BA | 2748 |
| 1304750 | 27023 | 27038 | N/A | N/A | AGGCUATACCTAACAC | 36 | BA | 2749 |
| | 27059 | 27074 | | | | | | |
| | 27095 | 27110 | | | | | | |
| | 27113 | 27128 | | | | | | |
| 1304751 | 15113 | 15128 | N/A | N/A | TCCAGTCAGAGTCTGT | 22 | BA | 1068 |
| | 15259 | 15274 | | | | | | |
| 1304753 | 27022 | 27037 | N/A | N/A | GGCTATACCTAACACA | 44 | BA | 162 |
| | 27058 | 27073 | | | | | | |
| | 27112 | 27127 | | | | | | |
| 1304757 | 16644 | 16659 | 2962 | 2977 | GTTAGACTCTGGCTGG | 47 | BA | 1274 |
| 1304758 | 14594 | 14609 | N/A | N/A | GTCTGTCCTCAGAGTA | 14 | BA | 990 |
| | 14886 | 14901 | | | | | | |
| | 15176 | 15191 | | | | | | |
| | 15249 | 15264 | | | | | | |
| 1304760 | 27201 | 27216 | N/A | N/A | GCAGUATTGAGACAGG | 55 | BA | 2750 |
| 1304761 | 23305 | 23320 | N/A | N/A | TTATCTTATTAGCAGC | 49 | BA | 922 |
| 1304762 | 11950 | 11965 | 2253 | 2268 | ACAGGTTCATCCTCAG | 53 | BA | 806 |
| 1304765 | 12466 | 12481 | 2769 | 2784 | ACAGUGACTCCACCCG | 55 | BA | 2751 |
| 1304769 | 21596 | 21611 | N/A | N/A | AATAUGAGGACCCAGG | 65 | BA | 2752 |
| 1304770 | 12140 | 12155 | 2443 | 2458 | CCCTUTTCGAATTTGC | 52 | BA | 2753 |
| 1304771 | 5288 | 5303 | 240 | 255 | GCCAAATGCTTACCAG | 48 | BA | 333 |
| 1304776 | 12454 | 12469 | 2757 | 2772 | CCCGATGACAGTTCTC | 43 | BA | 268 |
| 1304777 | 17665 | 17680 | N/A | N/A | ATATCGAGCATCATGG | 64 | BA | 375 |
| 1304778 | 23497 | 23512 | N/A | N/A | TCCTAGTGTAGAGGCT | 31 | BA | 154 |
| | 23530 | 23545 | | | | | | |
| 1304780 | 29461 | 29476 | N/A | N/A | GTCAAATTAAGCCCAT | 31 | BA | 168 |
| 1304782 | 25161 | 25176 | N/A | N/A | GACCUATAAGGACCCA | 62 | BA | 2754 |
| 1304787 | 26959 | 26974 | N/A | N/A | CGACUGATTAATGCCA | 53 | BA | 2755 |
| 1304789 | 26960 | 26975 | N/A | N/A | TCGACTGATTAATGCC | 50 | BA | 2558 |
| 1304792 | 26962 | 26977 | N/A | N/A | TCTCGACTGATTAATG | 86 | BA | 2667 |
| 1304794 | 14583 | 14598 | N/A | N/A | GAGTAAGGCAGGTGCC | 35 | BA | 2452 |
| | 14875 | 14890 | | | | | | |
| | 15165 | 15180 | | | | | | |
| | 15238 | 15253 | | | | | | |
| 1304796 | 18351 | 18366 | N/A | N/A | GACTUTAACACTTGCT | 66 | BA | 2756 |
| 1304798 | 14584 | 14599 | N/A | N/A | AGAGUAAGGCAGGTGC | 24 | BA | 2757 |
| | 14876 | 14891 | | | | | | |
| | 15166 | 15181 | | | | | | |
| | 15239 | 15254 | | | | | | |
| 1304800 | 17987 | 18002 | N/A | N/A | CCATACAAAGCATTCT | 58 | BA | 2224 |
| 1304802 | 17698 | 17713 | N/A | N/A | CATCUATGAACATGGC | 61 | BA | 2758 |
| 1304804 | 19883 | 19898 | N/A | N/A | CTTGATTAGTTTCCCC | 29 | BA | 1764 |
| 1304805 | 19268 | 19283 | N/A | N/A | GACACTAGAGCCTCAG | 71 | BA | 1686 |
| 1304806 | 26957 | 26972 | N/A | N/A | ACTGATTAATGCCACT | 43 | BA | 1392 |
| 1304807 | 17671 | 17686 | N/A | N/A | TGGAATATATCGAGCA | 66 | BA | 1454 |
| 1304808 | 26601 | 26616 | N/A | N/A | TTATUTGGTGATACGG | 71 | BA | 2759 |
| 1304809 | 27368 | 27383 | N/A | N/A | GAGCATTTAGGACCGT | 37 | BA | 1393 |
| 1304811 | 18758 | 18773 | N/A | N/A | GCATUTAAGCCACCGA | 99 | BA | 2760 |
| 1304814 | 6741 | 6756 | N/A | N/A | AGGGAATTCCGACACA | 55 | BA | 673 |
| 1304815 | 17446 | 17461 | N/A | N/A | AGATUAACATTAGGTC | 82 | BA | 2761 |
| 1304817 | 23285 | 23300 | N/A | N/A | TACAUTATATGCCTCC | 47 | BA | 2762 |
| 1304825 | 21599 | 21614 | N/A | N/A | TACAATATGAGGACCC | 67 | BA | 228 |
| 1304826 | 11261 | 11276 | 1564 | 1579 | CTCAUGATCAGGTCCC | 56 | BA | 2763 |
| 1304827 | 25019 | 25034 | N/A | N/A | GTAACTACATAGAGCA | 76 | BA | 2466 |
| 1304828 | 36033 | 36048 | 4386 | 4401 | TGAAUTTTCAACCAGC | 61 | BA | 2764 |
| 1304829 | 14508 | 14523 | N/A | N/A | GGAAGGAAGGTGCTAT | 40 | BA | 2451 |
| | 14654 | 14669 | | | | | | |
| | 14727 | 14742 | | | | | | |
| | 14800 | 14815 | | | | | | |
| | 14946 | 14961 | | | | | | |
| | 15019 | 15034 | | | | | | |
| | 15092 | 15107 | | | | | | |
| 1232737 | 5138 | 5153 | 90 | 105 | ATGCCATCTTGACCCA | 59 | BB | 22 |
| 1304677 | 20583 | 20598 | N/A | N/A | GACCAGAGAGCTCCGG | 30 | BB | 73 |
| | 20709 | 20724 | | | | | | |
| | 20751 | 20766 | | | | | | |
| | 20919 | 20934 | | | | | | |
| 1304678 | 23822 | 23837 | N/A | N/A | ATGAUTATTAGTGGGT | 69 | BB | 2765 |
| 1304680 | 6020 | 6035 | 972 | 987 | TCCTGTTGATCGCAGC | 66 | BB | 2338 |
| 1304681 | 11299 | 11314 | 1602 | 1617 | CGATCTTGTGGATGGG | 27 | BB | 2343 |
| 1304682 | 12465 | 12480 | 2768 | 2783 | CAGTGACTCCACCCGA | 44 | BB | 2350 |
| 1304685 | 20642 | 20657 | N/A | N/A | AGCAUCAGGACACACC | 21 | BB | 2766 |
| | 20684 | 20699 | | | | | | |
| | 20726 | 20741 | | | | | | |
| | 20810 | 20825 | | | | | | |
| | 20852 | 20867 | | | | | | |
| | 21020 | 21035 | | | | | | |
| 1304687 | 5245 | 5260 | 197 | 212 | AGTGUGTCCTGAGCCA | 58 | BB | 2767 |
| 1304688 | 25033 | 25048 | N/A | N/A | AGGTATTGACAATAGT | 29 | BB | 2312 |
| 1304690 | 14586 | 14601 | N/A | N/A | TCAGAGTAAGGCAGGT | 27 | BB | 2221 |
| | 14878 | 14893 | | | | | | |
| | 15168 | 15183 | | | | | | |
| | 15241 | 15256 | | | | | | |
| 1304691 | 10300 | 10315 | 1100 | 1115 | GTACUCCAGTAAACCC | 49 | BB | 2768 |
| 1304693 | 27111 | 27126 | N/A | N/A | GCTAUACCTAACACAT | 27 | BB | 2769 |
| | 27129 | 27144 | | | | | | |
| 1304696 | 14604 | 14619 | N/A | N/A | TTCAGTGAGAGTCTGT | 43 | BB | 1144 |
| | 14750 | 14765 | | | | | | |
| | 14896 | 14911 | | | | | | |
| | 15042 | 15057 | | | | | | |
| 1304698 | 14675 | 14690 | N/A | N/A | CAATCAGAGTCTGTCC | 29 | BB | 1760 |
| | 14821 | 14836 | | | | | | |
| | 14967 | 14982 | | | | | | |
| 1304699 | 20635 | 20650 | N/A | N/A | GGACACACCTGACCAG | 22 | BB | 2073 |
| | 20677 | 20692 | | | | | | |
| | 20719 | 20734 | | | | | | |
| | 20761 | 20776 | | | | | | |
| | 20803 | 20818 | | | | | | |
| 1304701 | 14501 | 14516 | N/A | N/A | AGGTGCTATCTAGAGA | 31 | BB | 1681 |
| | 14647 | 14662 | | | | | | |
| | 14720 | 14735 | | | | | | |
| | 14793 | 14808 | | | | | | |
| | 14939 | 14954 | | | | | | |
| | 15012 | 15027 | | | | | | |
| | 15085 | 15100 | | | | | | |
| 1304702 | 20274 | 20289 | N/A | N/A | GACGATTTCATCCCAG | 26 | BB | 1918 |
| 1304703 | 26956 | 26971 | N/A | N/A | CTGAUTAATGCCACTT | 74 | BB | 2770 |
| 1304704 | 14504 | 14519 | N/A | N/A | GGAAGGTGCTATCTAG | 31 | BB | 1835 |
| | 14650 | 14665 | | | | | | |
| | 14723 | 14738 | | | | | | |
| | 14796 | 14811 | | | | | | |
| | 14942 | 14957 | | | | | | |
| | 15015 | 15030 | | | | | | |
| | 15088 | 15103 | | | | | | |
| 1304705 | 11236 | 11251 | 1539 | 1554 | TCTGUGTCACAAGGCT | 72 | BB | 2771 |
| 1304711 | 14589 | 14604 | N/A | N/A | TCCTCAGAGTAAGGCA | 66 | BB | 682 |
| | 14881 | 14896 | | | | | | |
| | 15171 | 15186 | | | | | | |
| | 15244 | 15259 | | | | | | |
| 1304713 | 20632 | 20647 | N/A | N/A | CACACCTGACCAGAGA | 29 | BB | 1842 |
| | 20674 | 20689 | | | | | | |
| | 20716 | 20731 | | | | | | |
| | 20758 | 20773 | | | | | | |
| | 20800 | 20815 | | | | | | |
| | 20926 | 20941 | | | | | | |
| | 21052 | 21067 | | | | | | |
| 1304715 | 19882 | 19897 | N/A | N/A | TTGAUTAGTTTCCCCG | 61 | BB | 2772 |
| 1304717 | 22432 | 22447 | N/A | N/A | AGCAUAATGTCCCCGA | 56 | BB | 2773 |
| 1304719 | 11235 | 11250 | 1538 | 1553 | CTGTGTCACAAGGCTC | 39 | BB | 1572 |
| 1304725 | 12486 | 12501 | 2789 | 2804 | GTTAUGGAGAAACCCC | 47 | BB | 2774 |
| 1304726 | 18856 | 18871 | N/A | N/A | TGCAGTAACATATCCA | 22 | BB | 1532 |
| 1304727 | 23038 | 23053 | 3313 | 3328 | TAGAGTCTGGTCAGGG | 41 | BB | 1893 |
| 1304728 | 14667 | 14682 | N/A | N/A | GTCTGTCCTCAGAGGA | 15 | BB | 1452 |
| | 14740 | 14755 | | | | | | |
| | 14813 | 14828 | | | | | | |
| | 14959 | 14974 | | | | | | |
| | 15032 | 15047 | | | | | | |
| 1304729 | 14558 | 14573 | N/A | N/A | GATGGGTGCTGAGCCC | 40 | BB | 1066 |
| | 14850 | 14865 | | | | | | |
| | 15140 | 15155 | | | | | | |
| | 15213 | 15228 | | | | | | |
| | 15286 | 15301 | | | | | | |
| 1304730 | 15182 | 15197 | N/A | N/A | GTCAGAGTCTGTCCTC | 3 | BB | 1145 |
| | 15255 | 15270 | | | | | | |
| 1304737 | 14581 | 14596 | N/A | N/A | GTAAGGCAGGTGCCAT | 34 | BB | 1990 |
| | 14873 | 14888 | | | | | | |
| | 15163 | 15178 | | | | | | |
| | 15236 | 15251 | | | | | | |
| 1304739 | 14668 | 14683 | N/A | N/A | AGTCUGTCCTCAGAGG | 7 | BB | 2775 |
| | 14741 | 14756 | | | | | | |
| | 14814 | 14829 | | | | | | |
| | 14960 | 14975 | | | | | | |
| | 15033 | 15048 | | | | | | |
| 1304740 | 10881 | 10896 | 1184 | 1199 | AATGCACTGGAATCTG | 51 | BB | 1878 |
| 1304742 | 12275 | 12290 | 2578 | 2593 | GCTTUCACTTCAATCC | 37 | BB | 2776 |
| 1304744 | 10928 | 10943 | 1231 | 1246 | CGTTUGTTGAGGCTCA | 45 | BB | 2777 |
| 1304746 | 14603 | 14618 | N/A | N/A | TCAGUGAGAGTCTGTC | 32 | BB | 2778 |
| | 14749 | 14764 | | | | | | |
| | 14895 | 14910 | | | | | | |
| | 15041 | 15056 | | | | | | |
| 1304748 | 20588 | 20603 | N/A | N/A | CACCUGACCAGAGAGC | 38 | BB | 2779 |
| | 20630 | 20645 | | | | | | |
| | 20672 | 20687 | | | | | | |
| | 20714 | 20729 | | | | | | |
| | 20756 | 20771 | | | | | | |
| | 20798 | 20813 | | | | | | |
| | 20924 | 20939 | | | | | | |
| | 21050 | 21065 | | | | | | |
| 1304752 | 31017 | 31032 | 3461 | 3476 | AGTGCTGAGTACCGAG | 43 | BB | 972 |
| 1304754 | 14574 | 14589 | N/A | N/A | AGGTGCCATCTAGAGG | 34 | BB | 1528 |
| | 14866 | 14881 | | | | | | |
| | 15156 | 15171 | | | | | | |
| | 15229 | 15244 | | | | | | |
| 1304755 | 18855 | 18870 | N/A | N/A | GCAGUAACATATCCAT | 44 | BB | 2780 |
| 1304756 | 11977 | 11992 | 2280 | 2295 | ACTTCTCGCAGTCCAC | 49 | BB | 960 |
| 1304759 | 24553 | 24568 | N/A | N/A | GTCAAATTGCCAAGGA | 59 | BB | 1003 |
| 1304763 | 14485 | 14500 | N/A | N/A | AATGGGTGCTGAGCCT | 17 | BB | 911 |
| | 14631 | 14646 | | | | | | |
| | 14777 | 14792 | | | | | | |
| | 15069 | 15084 | | | | | | |
| 1304764 | 12704 | 12719 | N/A | N/A | TATGATGTAGCTGTGG | 54 | BB | 678 |
| 1304766 | 14480 | 14495 | N/A | N/A | GTGCUGAGCCTCCTAC | 27 | BB | 2781 |
| | 14626 | 14641 | | | | | | |
| | 14772 | 14787 | | | | | | |
| | 15064 | 15079 | | | | | | |
| 1304767 | 28760 | 28775 | N/A | N/A | AACTATTAAGCAACGG | 54 | BB | 628 |
| 1304768 | 16732 | 16747 | 3050 | 3065 | CCGAATGTTACAGCCA | 60 | BB | 501 |
| 1304772 | 26784 | 26799 | N/A | N/A | CCCAATCGATAGATCT | 38 | BB | 468 |
| 1304773 | 5148 | 5163 | 100 | 115 | CCACUTCACGATGCCA | 56 | BB | 2782 |
| 1304774 | 14502 | 14517 | N/A | N/A | AAGGUGCTATCTAGAG | 18 | BB | 2783 |
| | 14648 | 14663 | | | | | | |
| | 14721 | 14736 | | | | | | |
| | 14794 | 14809 | | | | | | |
| | 14940 | 14955 | | | | | | |
| | 15013 | 15028 | | | | | | |
| | 15086 | 15101 | | | | | | |
| 1304775 | 5171 | 5186 | 123 | 138 | GTATUACAGTTTACGG | 89 | BB | 2784 |
| 1304779 | 26973 | 26988 | N/A | N/A | ATGCATAAAAGTCTCG | 32 | BB | 85 |
| 1304781 | 23496 | 23511 | N/A | N/A | CCTAGTGTAGAGGCTG | 35 | BB | 2801 |
| | 23529 | 23544 | | | | | | |
| 1304783 | 17669 | 17684 | N/A | N/A | GAATATATCGAGCATC | 63 | BB | 68 |
| 1304784 | 27199 | 27214 | N/A | N/A | AGTAUTGAGACAGGCA | 42 | BB | 2785 |
| 1304785 | 26958 | 26973 | N/A | N/A | GACTGATTAATGCCAC | 35 | BB | 2620 |
| 1304786 | 5133 | 5148 | 85 | 100 | ATCTUGACCCATCAGC | 93 | BB | 2786 |
| 1304788 | 26961 | 26976 | N/A | N/A | CTCGACTGATTAATGC | 70 | BB | 2544 |
| 1304790 | 27028 | 27043 | N/A | N/A | CCCAUAGGCTATACCT | 20 | BB | 2787 |
| | 27064 | 27079 | | | | | | |
| 1304791 | 27094 | 27109 | N/A | N/A | GGCTATACCTAACACG | 54 | BB | 2515 |
| 1304793 | 5249 | 5264 | 201 | 216 | CAGGAGTGTGTCCTGA | 39 | BB | 2663 |
| 1304795 | 21598 | 21613 | N/A | N/A | ACAAUATGAGGACCCA | 20 | BB | 2788 |
| 1304797 | 35773 | 35788 | 4126 | 4141 | CTAAUTACATGAGGTC | 72 | BB | 2789 |
| 1304799 | 22900 | 22915 | N/A | N/A | GACAAGGAAGCACCCG | 43 | BB | 2076 |
| 1304801 | 19474 | 19489 | N/A | N/A | GCAAAGATGAAGAGTG | 59 | BB | 2071 |
| 1304803 | 14506 | 14521 | N/A | N/A | AAGGAAGGTGCTATCT | 47 | BB | 1989 |
| | 14652 | 14667 | | | | | | |
| | 14725 | 14740 | | | | | | |
| | 14798 | 14813 | | | | | | |
| | 14944 | 14959 | | | | | | |
| | 15017 | 15032 | | | | | | |
| | 15090 | 15105 | | | | | | |
| 1304810 | 17464 | 17479 | N/A | N/A | GTCTUTAAAGGAGTGA | 50 | BB | 2790 |
| 1304812 | 14492 | 14507 | N/A | N/A | CTAGAGAAATGGGTGC | 28 | BB | 1065 |
| | 14638 | 14653 | | | | | | |
| | 14711 | 14726 | | | | | | |
| | 14784 | 14799 | | | | | | |
| | 15003 | 15018 | | | | | | |
| | 15076 | 15091 | | | | | | |
| 1304813 | 27198 | 27213 | N/A | N/A | GTATUGAGACAGGCAG | 43 | BB | 2791 |
| 1304816 | 35774 | 35789 | 4127 | 4142 | GCTAATTACATGAGGT | 51 | BB | 670 |
| 1304818 | 11043 | 11058 | 1346 | 1361 | CATCUTAATGGGACTC | 59 | BB | 2792 |
| 1304819 | 17672 | 17687 | N/A | N/A | ATGGAATATATCGAGC | 66 | BB | 145 |
| 1304820 | 20696 | 20711 | N/A | N/A | CGGAATAGAGAAAGCA | 46 | BB | 688 |
| | 20738 | 20753 | | | | | | |
| | 20906 | 20921 | | | | | | |
| | 20990 | 21005 | | | | | | |
| 1304821 | 23494 | 23509 | N/A | N/A | TAGTGTAGAGGCTGCA | 41 | BB | 538 |
| | 23527 | 23542 | | | | | | |
| 1304822 | 12139 | 12154 | 2442 | 2457 | CCTTUTCGAATTTGCC | 41 | BB | 2793 |
| 1304823 | 23303 | 23318 | N/A | N/A | ATCTUATTAGCAGCAG | 49 | BB | 2794 |
| 1304824 | 5138 | 5153 | 90 | 105 | ATGCCATCTTGACCCA | 57 | BB | 22 |

### Example 6: Effect of 3-10-3 cEt or Mixed MOE and cEt Uniform Phosphorothioate Modified Oligonucleotides on Human NLRP3 RNA In Vitro, Single Dose

[0350] Modified oligonucleotides complementary to human NLRP3 nucleic acid were designed and tested for their single dose effects on NLRP3 RNA in vitro. The modified oligonucleotides were tested in a series of experiments that had the same culture conditions.

[0351] “Start site” indicates the 5′-most nucleoside to which the modified oligonucleotide is complementary in the target nucleic acid sequence. “Stop site” indicates the 3′-most nucleoside to which the modified oligonucleotide is complementary in the target nucleic acid sequence. Each modified oligonucleotide listed in the tables below is 100% complementary to SEQ ID NO: 1 (described herein above), to SEQ ID NO: 2 (described herein above), or to both. “N/A” indicates that the modified oligonucleotide is not 100% complementary to that particular target nucleic acid sequence.

[0352] Cultured THP-1 cells were treated with modified oligonucleotide at a concentration of 2000 nM by electroporation at a density of 100,000 cells per well. After a treatment period of approximately 24 hours, total RNA was isolated from the cells and NLRP3 RNA levels were measured by quantitative real-time RTPCR. NLRP3 RNA levels were measured by human primer-probe set RTS37509 (described herein above). NLRP3 RNA levels were normalized to total RNA content, as measured by RIBOGREEN®. Reduction of NLRP3 RNA is presented in the tables below as percent NLRP3 RNA relative to the amount of NLRP3 RNA in untreated control cells (% UTC).

[0353] Each separate experimental analysis described in this example is identified by a letter ID in the table column below labeled “AID” (Analysis ID). In the tables below, Compound No. 1232737 (described herein above) was used as a benchmark.

[0354] The modified oligonucleotides in the tables below are 3-10-3 cEt modified oligonucleotides with uniform phosphorothioate internucleoside linkages. The modified oligonucleotides are 16 nucleosides in length, wherein the central gap segment consists of ten 2′-β-D-deoxynucleosides, and wherein the 5′ and 3′ wing segments each consist of three cEt modified nucleosides. The sugar motif for the modified oligonucleotides is (from 5′ to 3′): kkkddddddddddkkk; wherein each “d” represents a 2′-β-D-deoxyribosyl sugar moiety, and each “k” represents a cEt sugar moiety. The internucleoside linkage motif for the modified oligonucleotides is (from 5′ to 3′): sssssssssssssss; wherein each “s” represents a phosphorothioate internucleoside linkage. Each cytosine residue is a 5-methyl cytosine.

TABLE 8
Reduction of NLRP3 RNA by 3-10-3 cEt modified oligonucleotides with uniform
phosphorothioate internucleoside linkages at a concentration of 2000 nM in THP-1 cells

| | SEQ | SEQ | SEQ | SEQ | | | | |
|---|---|---|---|---|---|---|---|---|
| | ID | ID | ID | ID | | | | |
| | No: 1 | No: 1 | No: 2 | No: 2 | | NLRP3 | | |
| Compound | Start | Stop | Start | Stop | | (% | | SEQ ID |
| Number | Site | Site | Site | Site | Sequence (5′ to 3′) | UTC) | AID | NO |
| 1232737 | 5138 | 5153 | 90 | 105 | ATGCCATCTTGACCCA | 57 | AG | 22 |
| 1301164 | 27197 | 27212 | N/A | N/A | TATTGAGACAGGCAGT | 54 | AG | 2795 |
| 1301200 | 6742 | 6757 | N/A | N/A | AAGGGAATTCCGACAC | 39 | AG | 2796 |
| 1301256 | 18352 | 18367 | N/A | N/A | GGACTTTAACACTTGC | 24 | AG | 2665 |
| 1301280 | 19887 | 19902 | N/A | N/A | GATTCTTGATTAGTTT | 55 | AG | 2671 |
| 1301290 | 20425 | 20440 | N/A | N/A | GTTTGTAAGTGAAGCG | 34 | AG | 2797 |
| 1301307 | 25015 | 25030 | N/A | N/A | CTACATAGAGCATATT | 100 | AG | 2798 |
| 1301318 | 25035 | 25050 | N/A | N/A | TTAGGTATTGACAATA | 58 | AG | 2799 |

[0355] The modified oligonucleotides in the table below are 16 nucleosides in length, wherein the sugar motif for the modified oligonucleotides is (from 5′ to 3′): kekdddddddddeekk; wherein each “d” represents a 2′-β-D-deoxyribosyl sugar moiety, each “e” represents a 2′-MOE sugar moiety, and each “k” represents a cEt sugar moiety. The internucleoside linkage motif for the modified oligonucleotides is (from 5′ to 3′): sssssssssssssss; wherein each “s” represents a phosphorothioate internucleoside linkage. Each cytosine residue is a 5-methyl cytosine.

TABLE 9
Reduction of NLRP3 RNA by modified oligonucleotides with a mixed MOE/cEt sugar motif and
uniform phosphorothioate internucleoside linkages at a concentration of 2000 nM in THP-1
cells

| | SEQ | SEQ | SEQ | SEQ | | | | |
|---|---|---|---|---|---|---|---|---|
| | ID | ID | ID | ID | | | | |
| | No: 1 | No: 1 | No: 2 | No: 2 | | NLRP3 | | |
| Compound | Start | Stop | Start | Stop | | (% | | SEQ ID |
| Number | Site | Site | Site | Site | Sequence (5′ to 3′) | UTC) | AID | NO |
| 1232737 | 5138 | 5153 | 90 | 105 | ATGCCATCTTGACCCA | 57 | AG | 22 |
| 1299609 | 12464 | 12479 | 2767 | 2782 | AGTGACTCCACCCGAT | 41 | AG | 2733 |
| 1299620 | 12702 | 12717 | N/A | N/A | TGATGTAGCTGTGGCA | 42 | AG | 2654 |
| 1299643 | 14590 | 14605 | N/A | N/A | GTCCTCAGAGTAAGGC | 27 | AG | 759 |
| | 14882 | 14897 | | | | | | |
| | 15172 | 15187 | | | | | | |
| | 15245 | 15260 | | | | | | |
| 1299658 | 15183 | 15198 | N/A | N/A | CGTCAGAGTCTGTCCT | 15 | AG | 2656 |
| 1299684 | 17671 | 17686 | N/A | N/A | TGGAATATATCGAGCA | 20 | AG | 1454 |
| 1299691 | 21598 | 21613 | N/A | N/A | ACAATATGAGGACCCA | 49 | AG | 2383 |
| 1299718 | 23501 | 23516 | N/A | N/A | TCTTTCCTAGTGTAGA | 109 | AG | 2635 |
| 1299734 | 23534 | 23549 | N/A | N/A | CCTCTCCTAGTGTAGA | 94 | AG | 2732 |
| 1299739 | 23002 | 23017 | 3277 | 3292 | GATGCAAGATCCTGAC | 49 | AG | 2123 |
| 1299743 | 11048 | 11063 | 1351 | 1366 | AACTCCATCTTAATGG | 97 | AG | 2110 |
| 1299748 | 17441 | 17456 | N/A | N/A | AACATTAGGTCTTGTG | 52 | AG | 684 |
| 1299753 | 12134 | 12149 | 2437 | 2452 | TCGAATTTGCCATAGT | 56 | AG | 2115 |
| 1299754 | 23039 | 23054 | 3314 | 3329 | ATAGAGTCTGGTCAGG | 45 | AG | 351 |
| 1299756 | 17698 | 17713 | N/A | N/A | CATCTATGAACATGGC | 32 | AG | 1916 |
| 1299760 | 17449 | 17464 | N/A | N/A | ACTAGATTAACATTAG | 88 | AG | 992 |
| 1299878 | 26968 | 26983 | N/A | N/A | TAAAAGTCTCGACTGA | 57 | AG | 546 |
| 1299888 | 27024 | 27039 | N/A | N/A | TAGGCTATACCTAACA | 33 | AG | 239 |
| | 27060 | 27075 | | | | | | |
| | 27096 | 27111 | | | | | | |
| | 27114 | 27129 | | | | | | |
| 1299931 | 35776 | 35791 | 4129 | 4144 | GAGCTAATTACATGAG | 54 | AG | 824 |
| 1299937 | 26603 | 26618 | N/A | N/A | CCTTATTTGGTGATAC | 72 | AG | 1314 |

[0356] The modified oligonucleotides in the table below are 16 nucleosides in length, wherein the sugar motif for the modified oligonucleotides is (from 5′ to 3′): kkdddddddddkekek; wherein each “d” represents a 2′-β-D-deoxyribosyl sugar moiety, each “e” represents a 2′-MOE sugar moiety, and each “k” represents a cEt sugar moiety. The internucleoside linkage motif for the modified oligonucleotides is (from 5′ to 3′): sssssssssssssss; wherein each “s” represents a phosphorothioate internucleoside linkage. Each cytosine residue is a 5-methyl cytosine.

TABLE 10
Reduction of NLRP3 RNA by modified oligonucleotides with a mixed MOE/cEt sugar motif and
uniform phosphorothioate internucleoside linkages at a concentration of 2000 nM in THP-1
cells

| | SEQ | SEQ | SEQ | SEQ | | | | |
|---|---|---|---|---|---|---|---|---|
| | ID | ID | ID | ID | | | | |
| | No: 1 | No: 1 | No: 2 | No: 2 | | NLRP3 | | |
| Compound | Start | Stop | Start | Stop | | (% | | SEQ ID |
| Number | Site | Site | Site | Site | Sequence (5′ to 3′) | UTC) | AID | NO |
| 1232737 | 5138 | 5153 | 90 | 105 | ATGCCATCTTGACCCA | 57 | AG | 22 |
| 1300713 | 5249 | 5264 | 201 | 216 | CAGGAGTGTGTCCTGA | 100 | AG | 2663 |
| 1300720 | 26957 | 26972 | N/A | N/A | ACTGATTAATGCCACT | 65 | AG | 1392 |
| 1300731 | 27130 | 27145 | N/A | N/A | AGCTATACCTAACACA | 77 | AG | 2239 |
| 1300764 | 10928 | 10943 | 1231 | 1246 | CGTTTGTTGAGGCTCA | 58 | AG | 1417 |
| 1300777 | 5147 | 5162 | 99 | 114 | CACTTCACGATGCCAT | 45 | AG | 330 |
| 1300780 | 11008 | 11023 | 1311 | 1326 | TGGTCTTGCCGATGGC | 60 | AG | 2033 |
| 1300799 | 11296 | 11311 | 1599 | 1614 | TCTTGTGGATGGGTGG | 95 | AG | 2188 |
| 1300803 | 11302 | 11317 | 1605 | 1620 | TCACGATCTTGTGGAT | 93 | AG | 803 |
| 1300805 | 11973 | 11988 | 2276 | 2291 | CTCGCAGTCCACTTCC | 70 | AG | 868 |
| 1300818 | 11979 | 11994 | 2282 | 2297 | GAACTTCTCGCAGTCC | 67 | AG | 1114 |
| 1300842 | 5168 | 5183 | 120 | 135 | TTACAGTTTACGGTGA | 77 | AG | 24 |
| 1300852 | 14476 | 14491 | N/A | N/A | TGAGCCTCCTACCGGG | 60 | AG | 2142 |
| | 14622 | 14637 | | | | | | |
| | 14768 | 14783 | | | | | | |
| | 14914 | 14929 | | | | | | |
| | 15060 | 15075 | | | | | | |
| 1300871 | 16730 | 16745 | 3048 | 3063 | GAATGTTACAGCCAGG | 77 | AG | 2275 |
| 1300911 | 20584 | 20599 | N/A | N/A | TGACCAGAGAGCTCCG | 74 | AG | 150 |
| | 20710 | 20725 | | | | | | |
| | 20752 | 20767 | | | | | | |
| | 20920 | 20935 | | | | | | |
| 1300997 | 12141 | 12156 | 2444 | 2459 | CCCCTTTTCGAATTTG | 60 | AG | 574 |
| 1301020 | 19879 | 19894 | N/A | N/A | ATTAGTTTCCCCGTCA | 49 | AG | 2647 |
| 1301044 | 12456 | 12471 | 2759 | 2774 | CACCCGATGACAGTTC | 58 | AG | 345 |
| 1301052 | 20593 | 20608 | N/A | N/A | GAATACACCTGACCAG | 79 | AG | 227 |
| 1301057 | 22429 | 22444 | N/A | N/A | ATAATGTCCCCGAGGC | 58 | AG | 2493 |
| 1301144 | 25746 | 25761 | N/A | N/A | TGTTGAAATTGAGAGG | 49 | AG | 2728 |

[0357] The modified oligonucleotides in the table below are 16 nucleosides in length, wherein the sugar motif for the modified oligonucleotides is (from 5′ to 3′): kkkdddddddddkkke; wherein each “d” represents a 2′-β-D-deoxyribosyl sugar moiety, each “e” represents a 2′-MOE sugar moiety, and each “k” represents a cEt sugar moiety. The internucleoside linkage motif for the modified oligonucleotides is (from 5′ to 3′): sssssssssssssss; wherein each “s” represents a phosphorothioate internucleoside linkage. Each cytosine residue is a 5-methyl cytosine.

TABLE 11
Reduction of NLRP3 RNA by modified oligonucleotides with a mixed MOE/cEt sugar motif and
uniform phosphorothioate internucleoside linkages at a concentration of 2000 nM in THP-1
cells

| | SEQ | SEQ | SEQ | SEQ | | | | |
|---|---|---|---|---|---|---|---|---|
| | ID | ID | ID | ID | | | | |
| | No: 1 | No: 1 | No: 2 | No: 2 | | NLRP3 | | |
| Compound | Start | Stop | Start | Stop | | (% | | SEQ ID |
| Number | Site | Site | Site | Site | Sequence (5′ to 3′) | UTC) | AID | NO |
| 1232737 | 5138 | 5153 | 90 | 105 | ATGCCATCTTGACCCA | 57 | AG | 22 |
| 1300281 | 27366 | 27381 | N/A | N/A | GCATTTAGGACCGTCC | 64 | AG | 241 |
| 1300287 | 27204 | 27219 | N/A | N/A | TGAGCAGTATTGAGAC | 74 | AG | 2729 |
| 1300295 | 6019 | 6034 | 971 | 986 | CCTGTTGATCGCAGCG | 57 | AG | 2260 |
| 1300301 | 10305 | 10320 | 1105 | 1120 | GAAAGGTACTCCAGTA | 49 | AG | 338 |
| 1300340 | 11259 | 11274 | 1562 | 1577 | CATGATCAGGTCCCCC | 57 | AG | 1957 |
| 1300380 | 12276 | 12291 | 2579 | 2594 | GGCTTTCACTTCAATC | 58 | AG | 2664 |
| 1300398 | 14569 | 14584 | N/A | N/A | CCATCTAGAGGGATGG | 86 | AG | 1220 |
| | 14861 | 14876 | | | | | | |
| | 15151 | 15166 | | | | | | |
| | 15224 | 15239 | | | | | | |
| 1300423 | 16642 | 16657 | 2960 | 2975 | TAGACTCTGGCTGGTG | 41 | AG | 2730 |
| 1300433 | 17664 | 17679 | N/A | N/A | TATCGAGCATCATGGT | 43 | AG | 2487 |
| 1300457 | 11041 | 11056 | 1344 | 1359 | TCTTAATGGGACTCAC | 45 | AG | 263 |
| 1300464 | 23281 | 23296 | N/A | N/A | TTATATGCCTCCAGTC | 43 | AG | 2507 |
| 1300474 | 23491 | 23506 | N/A | N/A | TGTAGAGGCTGCATGC | 36 | AG | 2501 |
| 1300481 | 23495 | 23510 | N/A | N/A | CTAGTGTAGAGGCTGC | 25 | AG | 615 |
| | 23528 | 23543 | | | | | | |
| 1300492 | 25162 | 25177 | N/A | N/A | CGACCTATAAGGACCC | 47 | AG | 2502 |
| 1300541 | 18857 | 18872 | N/A | N/A | GTGCAGTAACATATCC | 66 | AG | 2489 |
| 1300550 | 18756 | 18771 | N/A | N/A | ATTTAAGCCACCGAAC | 81 | AG | 2646 |
| 1300560 | 19270 | 19285 | N/A | N/A | TAGACACTAGAGCCTC | 56 | AG | 2658 |
| 1300575 | 20276 | 20291 | N/A | N/A | TTGACGATTTCATCCC | 41 | AG | 2672 |
| 1300582 | 20419 | 20434 | N/A | N/A | AAGTGAAGCGGGCGGT | 48 | AG | 2490 |
| 1300583 | 5139 | 5154 | 91 | 106 | GATGCCATCTTGACCC | 62 | AG | 2100 |
| 1300611 | 22899 | 22914 | N/A | N/A | ACAAGGAAGCACCCGT | 47 | AG | 1999 |
| 1300614 | 23823 | 23838 | N/A | N/A | CATGATTATTAGTGGG | 55 | AG | 78 |
| 1300623 | 14500 | 14515 | N/A | N/A | GGTGCTATCTAGAGAA | 25 | AG | 1604 |
| | 14646 | 14661 | | | | | | |
| | 14719 | 14734 | | | | | | |
| | 14792 | 14807 | | | | | | |
| | 14938 | 14953 | | | | | | |
| | 15011 | 15026 | | | | | | |
| | 15084 | 15099 | | | | | | |
| 1300637 | 25079 | 25094 | N/A | N/A | AGGCCGCTCTGTTTGT | 93 | AG | 2666 |
| 1300645 | 26785 | 26800 | N/A | N/A | CCCCAATCGATAGATC | 85 | AG | 2661 |
| 1300667 | 28755 | 28770 | N/A | N/A | TTAAGCAACGGTTACA | 51 | AG | 1472 |
| 1300673 | 29463 | 29478 | N/A | N/A | GAGTCAAATTAAGCCC | 87 | AG | 2495 |
| 1300679 | 28763 | 28778 | N/A | N/A | GGTAACTATTAAGCAA | 75 | AG | 2653 |
| 1300686 | 31019 | 31034 | 3463 | 3478 | TTAGTGCTGAGTACCG | 36 | AG | 1126 |
| 1300697 | 31081 | 31096 | 3525 | 3540 | GTAGTTTGATCCCCTT | 41 | AG | 1897 |
| 1300705 | 26596 | 26611 | N/A | N/A | TGGTGATACGGTTACT | 33 | AG | 2496 |

### Example 7: Dose-Dependent Inhibition of Human NLRP3 in THP-1 Cells by Modified Oligonucleotides

[0358] Modified oligonucleotides selected from the examples above were tested at various doses in THP-1 cells. Cultured THP-1 cells at a density of 300,000 cells per well were treated by electroporation with various concentrations of modified oligonucleotide as specified in the tables below. After a treatment period of approximately 24 hours, total RNA was isolated from the cells, and NLRP3 RNA levels were measured by quantitative real-time RTPCR. Human NLRP3 primer-probe set RTS37509 (described herein above) was used to measure RNA levels as described above. NLRP3 RNA levels were normalized to total RNA content, as measured by RIBOGREEN®. Reduction of NLRP3 RNA is presented in the tables below as percent NLRP3 RNA, relative to amount of NLRP3 RNA in untreated control cells (% UTC).

[0359] The half maximal inhibitory concentration (IC₅₀) of each modified oligonucleotide was calculated using a linear regression on a log/linear plot of the data in Excel and is also presented in the tables below.

TABLE 12
Dose-dependent reduction of human NLRP3 RNA
in THP-1 cells by modified oligonucleotides

| Compound | NLRP3 RNA (% UTC) | | | | | IC₅₀ |
|---|---|---|---|---|---|---|
| No. | 20 nM | 78 nM | 313 nM | 1250 nM | 5000 nM | (μM) |
| 1232737 | 89 | 86 | 70 | 52 | 24 | 1.04 |
| 1233042 | 69 | 102 | 75 | 61 | 26 | 1.95 |
| 1233104 | 72 | 63 | 51 | 26 | 11 | 0.19 |
| 1233105 | 65 | 58 | 36 | 29 | 7 | 0.11 |
| 1233144 | 89 | 78 | 47 | 28 | 7 | 0.31 |
| 1233153 | 79 | 78 | 61 | 30 | 16 | 0.38 |
| 1233154 | 103 | 60 | 58 | 29 | 16 | 0.39 |
| 1233168 | 81 | 75 | 43 | 27 | 11 | 0.26 |
| 1233176 | 73 | 47 | 48 | 20 | 7 | 0.12 |
| 1233177 | 72 | 65 | 37 | 11 | 9 | 0.13 |
| 1233208 | 87 | 73 | 53 | 30 | 12 | 0.34 |
| 1233240 | 105 | 62 | 47 | 24 | 19 | 0.34 |
| 1233241 | 83 | 68 | 47 | 26 | 6 | 0.24 |
| 1233242 | 90 | 90 | 82 | 43 | 17 | 0.89 |
| 1233289 | 99 | 87 | 59 | 32 | 9 | 0.48 |

TABLE 13
Dose-dependent reduction of human NLRP3 RNA
in THP-1 cells by modified oligonucleotides

| Compound | NLRP3 RNA (% UTC) | | | | | IC₅₀ |
|---|---|---|---|---|---|---|
| No. | 20 nM | 78 nM | 313 nM | 1250 nM | 5000 nM | (μM) |
| 1232737 | 100 | 90 | 73 | 54 | 24 | 1.21 |
| 1232754 | 70 | 72 | 43 | 40 | 26 | 0.32 |
| 1232764 | 96 | 81 | 56 | 33 | 18 | 0.49 |
| 1232843 | 81 | 75 | 46 | 44 | 27 | 0.49 |
| 1232844 | 83 | 59 | 50 | 34 | 19 | 0.28 |
| 1232859 | 84 | 80 | 46 | 34 | 12 | 0.34 |
| 1233075 | 109 | 78 | 56 | 39 | 14 | 0.55 |
| 1233083 | 84 | 69 | 35 | 16 | 4 | 0.18 |
| 1233100 | 92 | 67 | 41 | 29 | 13 | 0.28 |
| 1233106 | 85 | 76 | 62 | 42 | 20 | 0.57 |
| 1233172 | 84 | 75 | 70 | 36 | 17 | 0.52 |
| 1233220 | 109 | 76 | 61 | 35 | 20 | 0.59 |
| 1233244 | 99 | 76 | 68 | 42 | 11 | 0.58 |
| 1233251 | 85 | 74 | 63 | 40 | 25 | 0.60 |
| 1233290 | 82 | 78 | 67 | 41 | 18 | 0.58 |

TABLE 14
Dose-dependent reduction of human NLRP3 RNA
in THP-1 cells by modified oligonucleotides

| Compound | NLRP3 RNA (% UTC) | | | | | IC₅₀ |
|---|---|---|---|---|---|---|
| No. | 20 nM | 78 nM | 313 nM | 1250 nM | 5000 nM | (μM) |
| 1232737 | 87 | 66 | 64 | 48 | 33 | 0.89 |
| 1232741 | 75 | 71 | 52 | 31 | 26 | 0.34 |
| 1232806 | 97 | 85 | 66 | 46 | 25 | 0.88 |
| 1232821 | 89 | 83 | 59 | 33 | 17 | 0.48 |
| 1232845 | 70 | 58 | 41 | 21 | 11 | 0.13 |
| 1232846 | 71 | 45 | 31 | 22 | 14 | 0.08 |
| 1232878 | 79 | 77 | 52 | 33 | 17 | 0.36 |
| 1233117 | 100 | 100 | 76 | 63 | 37 | 2.68 |
| 1233143 | 90 | 79 | 62 | 34 | 33 | 0.72 |
| 1233157 | 91 | 82 | 62 | 45 | 29 | 0.85 |
| 1233174 | 86 | 61 | 35 | 22 | 13 | 0.19 |
| 1233175 | 73 | 57 | 37 | 16 | 9 | 0.12 |
| 1233229 | 70 | 72 | 60 | 37 | 26 | 0.45 |
| 1233246 | 104 | 98 | 70 | 32 | 12 | 0.65 |
| 1233278 | 83 | 70 | 56 | 43 | 21 | 0.48 |

TABLE 15
Dose-dependent reduction of human NLRP3 RNA
in THP-1 cells by modified oligonucleotides

| Compound | NLRP3 RNA (% UTC) | | | | | IC₅₀ |
|---|---|---|---|---|---|---|
| No. | 20 nM | 78 nM | 313 nM | 1250 nM | 5000 nM | (μM) |
| 1232737 | 89 | 73 | 75 | 54 | 35 | 1.69 |
| 1233167 | 78 | 70 | 56 | 30 | 17 | 0.32 |
| 1233279 | 80 | 66 | 52 | 22 | 11 | 0.23 |
| 1241459 | 90 | 75 | 51 | 48 | 29 | 0.69 |
| 1241865 | 69 | 60 | 32 | 21 | 10 | 0.11 |
| 1242009 | 83 | 70 | 54 | 42 | 24 | 0.48 |
| 1242081 | 93 | 79 | 65 | 32 | 18 | 0.52 |
| 1242201 | 99 | 72 | 44 | 26 | 21 | 0.37 |
| 1242273 | 101 | 81 | 49 | 39 | 22 | 0.56 |
| 1242393 | 83 | 66 | 53 | 32 | 17 | 0.31 |
| 1242441 | 85 | 72 | 48 | 28 | 21 | 0.34 |
| 1242442 | 71 | 59 | 45 | 25 | 19 | 0.17 |
| 1242489 | 84 | 66 | 46 | 31 | 23 | 0.31 |
| 1242633 | 85 | 69 | 56 | 32 | 9 | 0.31 |
| 1242704 | 78 | 71 | 58 | 27 | 8 | 0.28 |

TABLE 16
Dose-dependent reduction of human NLRP3 RNA
in THP-1 cells by modified oligonucleotides

| Compound | NLRP3 RNA (% UTC) | | | | | IC₅₀ |
|---|---|---|---|---|---|---|
| No. | 20 nM | 78 nM | 313 nM | 1250 nM | 5000 nM | (μM) |
| 1232737 | 102 | 87 | 76 | 56 | 37 | 2.05 |
| 1241580 | 110 | 83 | 94 | 64 | 40 | 3.63 |
| 1241773 | 104 | 45 | 63 | 24 | 11 | 0.30 |
| 1241843 | 88 | 107 | 56 | 39 | 22 | 0.74 |
| 1241866 | 100 | 59 | 56 | 21 | 17 | 0.32 |
| 1242274 | 105 | 94 | 66 | 50 | 39 | 1.65 |
| 1242419 | 97 | 72 | 68 | 40 | 24 | 0.70 |
| 1242443 | 102 | 87 | 49 | 21 | 22 | 0.46 |
| 1242491 | 106 | 96 | 68 | 44 | 22 | 0.92 |
| 1242514 | 128 | 117 | 93 | 39 | 16 | 1.17 |
| 1242516 | 84 | 69 | 61 | 38 | 27 | 0.54 |
| 1242538 | 138 | 109 | 108 | 60 | 29 | 2.32 |
| 1242706 | 96 | 79 | 70 | 40 | 31 | 0.93 |
| 1242922 | 66 | 52 | 43 | 16 | 4 | 0.09 |
| 1242969 | 128 | 117 | 91 | 66 | 47 | 4.11 |

TABLE 17
Dose-dependent reduction of human NLRP3 RNA
in THP-1 cells by modified oligonucleotides

| Compound | NLRP3 RNA (% UTC) | | | | | IC₅₀ |
|---|---|---|---|---|---|---|
| No. | 20 nM | 78 nM | 313 nM | 1250 nM | 5000 nM | (μM) |
| 1232737 | 90 | 78 | 68 | 49 | 32 | 1.12 |
| 1241703 | 105 | 63 | 68 | 58 | 37 | 1.50 |
| 1241774 | 99 | 75 | 53 | 34 | 18 | 0.45 |
| 1241868 | 85 | 79 | 56 | 32 | 17 | 0.41 |
| 1242061 | 87 | 74 | 54 | 26 | 13 | 0.33 |
| 1242444 | 96 | 65 | 50 | 24 | 17 | 0.32 |
| 1242445 | 81 | 72 | 39 | 16 | 7 | 0.19 |
| 1242470 | 95 | 66 | 43 | 25 | 6 | 0.26 |
| 1242493 | 69 | 64 | 30 | 11 | 11 | 0.11 |
| 1242517 | 70 | 41 | 27 | 18 | 13 | 0.06 |
| 1242518 | 58 | 65 | 35 | 14 | 13 | 0.09 |
| 1242588 | 106 | 99 | 73 | 35 | 12 | 0.72 |
| 1242707 | 80 | 83 | 63 | 30 | 15 | 0.43 |
| 1242804 | 84 | 53 | 47 | 25 | 33 | 0.26 |
| 1242923 | 80 | 74 | 41 | 35 | 20 | 0.31 |

TABLE 18
Dose-dependent reduction of human NLRP3 RNA
in THP-1 cells by modified oligonucleotides

| Compound | NLRP3 RNA (% UTC) | | | | | IC₅₀ |
|---|---|---|---|---|---|---|
| No. | 20 nM | 78 nM | 313 nM | 1250 nM | 5000 nM | (μM) |
| 1232737 | 101 | 93 | 81 | 58 | 44 | 3.28 |
| 1241775 | 87 | 70 | 49 | 29 | 13 | 0.30 |
| 1242206 | 112 | 87 | 65 | 29 | 14 | 0.59 |
| 1242446 | 96 | 78 | 56 | 22 | 7 | 0.35 |
| 1242447 | 98 | 63 | 32 | 16 | 12 | 0.22 |
| 1242471 | 103 | 75 | 51 | 24 | 12 | 0.37 |
| 1242494 | 99 | 68 | 44 | 24 | 6 | 0.28 |
| 1242495 | 86 | 78 | 59 | 29 | 8 | 0.36 |
| 1242496 | 103 | 82 | 61 | 48 | 22 | 0.80 |
| 1242519 | 81 | 55 | 22 | 11 | 3 | 0.10 |
| 1242543 | 107 | 74 | 45 | 36 | 15 | 0.44 |
| 1242567 | 93 | 74 | 50 | 36 | 15 | 0.41 |
| 1242614 | 112 | 97 | 64 | 37 | 12 | 0.67 |
| 1242805 | 96 | 98 | 59 | 36 | 18 | 0.65 |
| 1242807 | 103 | 81 | 64 | 45 | 23 | 0.79 |

TABLE 19
Dose-dependent reduction of human NLRP3 RNA
in THP-1 cells by modified oligonucleotides

| Compound | NLRP3 RNA (% UTC) | | | | | IC₅₀ |
|---|---|---|---|---|---|---|
| No. | 20 nM | 78 nM | 313 nM | 1250 nM | 5000 nM | (μM) |
| 1232737 | 88 | 69 | 70 | 61 | 42 | 2.87 |
| 1241491 | 83 | 88 | 78 | 45 | 19 | 0.86 |
| 1241586 | 88 | 81 | 53 | 36 | 21 | 0.50 |
| 1241921 | 65 | 58 | 44 | 25 | 13 | 0.13 |
| 1242497 | 91 | 86 | 49 | 25 | 7 | 0.34 |
| 1242546 | 99 | 62 | 30 | 15 | 6 | 0.20 |
| 1242616 | 92 | 77 | 59 | 29 | 10 | 0.40 |
| 1242617 | 105 | 72 | 64 | 29 | 7 | 0.43 |
| 1242618 | 91 | 79 | 69 | 39 | 20 | 0.65 |
| 1242831 | 85 | 67 | 39 | 27 | 13 | 0.24 |
| 1242833 | 95 | 84 | 53 | 37 | 16 | 0.50 |
| 1242904 | 89 | 81 | 45 | 24 | 10 | 0.31 |
| 1242905 | 80 | 68 | 43 | 30 | 14 | 0.24 |
| 1242928 | 97 | 71 | 60 | 27 | 11 | 0.38 |
| 1242929 | 101 | 85 | 64 | 39 | 24 | 0.74 |

TABLE 20
Dose-dependent reduction of human NLRP3 RNA
in THP-1 cells by modified oligonucleotides

| Compound | NLRP3 RNA (% UTC) | | | | | IC₅₀ |
|---|---|---|---|---|---|---|
| No. | 20 nM | 78 nM | 313 nM | 1250 nM | 5000 nM | (μM) |
| 1232737 | 84 | 79 | 69 | 50 | 29 | 1.04 |
| 1241661 | 70 | 74 | 61 | 28 | 12 | 0.28 |
| 1241826 | 88 | 57 | 40 | 24 | 10 | 0.20 |
| 1242453 | 95 | 92 | 56 | 40 | 14 | 0.57 |
| 1242476 | 97 | 84 | 50 | 21 | 6 | 0.34 |
| 1242499 | 79 | 56 | 31 | 9 | 3 | 0.11 |
| 1242500 | 74 | 48 | 22 | 8 | 2 | 0.07 |
| 1242501 | 82 | 83 | 50 | 23 | 4 | 0.28 |
| 1242523 | 83 | 71 | 49 | 26 | 9 | 0.26 |
| 1242547 | 74 | 57 | 28 | 10 | 4 | 0.10 |
| 1242571 | 106 | 76 | 39 | 15 | 6 | 0.29 |
| 1242572 | 49 | 54 | 47 | 20 | 8 | 0.06 |
| 1242834 | 100 | 83 | 52 | 21 | 8 | 0.37 |
| 1242835 | 87 | 61 | 60 | 29 | 12 | 0.31 |
| 1242907 | 87 | 71 | 57 | 36 | 6 | 0.34 |

TABLE 21
Dose-dependent reduction of human NLRP3 RNA
in THP-1 cells by modified oligonucleotides

| Compound | NLRP3 RNA (% UTC) | | | | | IC₅₀ |
|---|---|---|---|---|---|---|
| No. | 20 nM | 78 nM | 313 nM | 1250 nM | 5000 nM | (μM) |
| 1232737 | 92 | 80 | 63 | 61 | 40 | 2.20 |
| 1241687 | 86 | 53 | 47 | 26 | 16 | 0.22 |
| 1241688 | 87 | 74 | 52 | 34 | 20 | 0.42 |
| 1242071 | 110 | 92 | 58 | 41 | 18 | 0.70 |
| 1242118 | 72 | 89 | 78 | 43 | 32 | 1.25 |
| 1242119 | 110 | 76 | 62 | 25 | 19 | 0.51 |
| 1242454 | 83 | 59 | 45 | 20 | 5 | 0.18 |
| 1242455 | 95 | 68 | 48 | 21 | 7 | 0.27 |
| 1242477 | 95 | 83 | 47 | 20 | 19 | 0.38 |
| 1242478 | 72 | 71 | 62 | 41 | 16 | 0.40 |
| 1242574 | 84 | 74 | 51 | 31 | 15 | 0.34 |
| 1242598 | 100 | 58 | 37 | 20 | 13 | 0.24 |
| 1242599 | 84 | 59 | 41 | 21 | 9 | 0.19 |
| 1242645 | 94 | 106 | 64 | 44 | 28 | 1.08 |
| 1242669 | 62 | 81 | 50 | 31 | 21 | 0.28 |

TABLE 22
Dose-dependent reduction of human NLRP3 RNA
in THP-1 cells by modified oligonucleotides

| Compound | NLRP3 RNA (% UTC) | | | | | IC₅₀ |
|---|---|---|---|---|---|---|
| No. | 20 nM | 78 nM | 313 nM | 1250 nM | 5000 nM | (μM) |
| 1232737 | 83 | 78 | 71 | 57 | 37 | 2.02 |
| 1241643 | 92 | 71 | 59 | 30 | 17 | 0.41 |
| 1241689 | 75 | 68 | 40 | 32 | 16 | 0.22 |
| 1242000 | 84 | 76 | 66 | 51 | 29 | 0.99 |
| 1242001 | 77 | 64 | 56 | 37 | 22 | 0.36 |
| 1242072 | 84 | 77 | 61 | 38 | 15 | 0.47 |
| 1242456 | 78 | 70 | 46 | 19 | 6 | 0.20 |
| 1242457 | 79 | 62 | 37 | 18 | 6 | 0.16 |
| 1242481 | 80 | 78 | 64 | 48 | 21 | 0.67 |
| 1242503 | 90 | 81 | 56 | 31 | 13 | 0.41 |
| 1242504 | 69 | 66 | 57 | 29 | 12 | 0.23 |
| 1242553 | 84 | 80 | 50 | 25 | 17 | 0.34 |
| 1242601 | 95 | 40 | 18 | 11 | 6 | 0.11 |
| 1242624 | 75 | 66 | 58 | 26 | 26 | 0.32 |
| 1242695 | 88 | 80 | 72 | 41 | 13 | 0.60 |

TABLE 23
Dose-dependent reduction of human NLRP3 RNA
in THP-1 cells by modified oligonucleotides

| Compound | NLRP3 RNA (% UTC) | | | | | IC₅₀ |
|---|---|---|---|---|---|---|
| No. | 20 nM | 78 nM | 313 nM | 1250 nM | 5000 nM | (μM) |
| 1232737 | 89 | 73 | 68 | 53 | 31 | 1.14 |
| 1241621 | 87 | 70 | 56 | 32 | 22 | 0.41 |
| 1241668 | 73 | 82 | 55 | 35 | 24 | 0.44 |
| 1241669 | 76 | 66 | 49 | 33 | 20 | 0.28 |
| 1242098 | 74 | 63 | 59 | 33 | 20 | 0.32 |
| 1242458 | 89 | 83 | 42 | 25 | 7 | 0.30 |
| 1242459 | 94 | 84 | 70 | 42 | 11 | 0.62 |
| 1242482 | 71 | 74 | 58 | 25 | 8 | 0.25 |
| 1242485 | 67 | 58 | 29 | 11 | 3 | 0.09 |
| 1242579 | 85 | 73 | 54 | 29 | 20 | 0.37 |
| 1242603 | 94 | 84 | 56 | 26 | 14 | 0.42 |
| 1242626 | 52 | 74 | 59 | 26 | 9 | 0.17 |
| 1242627 | 80 | 77 | 62 | 32 | 14 | 0.40 |
| 1242698 | 89 | 69 | 59 | 41 | 17 | 0.47 |
| 1242916 | 95 | 76 | 57 | 26 | 12 | 0.39 |

TABLE 24
Dose-dependent reduction of human NLRP3 RNA
in THP-1 cells by modified oligonucleotides

| Compound | NLRP3 RNA (% UTC) | | | | | IC₅₀ |
|---|---|---|---|---|---|---|
| No. | 20 nM | 78 nM | 313 nM | 1250 nM | 5000 nM | (μM) |
| 1232737 | 79 | 78 | 73 | 50 | 39 | 1.84 |
| 1241455 | 78 | 79 | 50 | 28 | 25 | 0.37 |
| 1241456 | 77 | 85 | 61 | 31 | 17 | 0.44 |
| 1241648 | 86 | 68 | 58 | 43 | 19 | 0.48 |
| 1241695 | 97 | 98 | 71 | 50 | 25 | 1.15 |
| 1241791 | 90 | 79 | 62 | 46 | 20 | 0.66 |
| 1241861 | 96 | 67 | 63 | 44 | 25 | 0.67 |
| 1242438 | 103 | 91 | 72 | 36 | 29 | 0.95 |
| 1242439 | 83 | 77 | 58 | 30 | 25 | 0.46 |
| 1242486 | 74 | 59 | 39 | 23 | 12 | 0.15 |
| 1242487 | 78 | 73 | 52 | 30 | 17 | 0.31 |
| 1242558 | 75 | 71 | 55 | 28 | 19 | 0.30 |
| 1242631 | 93 | 53 | 43 | 31 | 17 | 0.25 |
| 1242822 | 105 | 71 | 47 | 20 | 15 | 0.34 |
| 1242965 | 81 | 84 | 58 | 32 | 24 | 0.50 |

TABLE 25
Dose-dependent reduction of human NLRP3 RNA
in THP-1 cells by modified oligonucleotides

| Compound | NLRP3 RNA (% UTC) | | | | | IC₅₀ |
|---|---|---|---|---|---|---|
| No. | 20 nM | 78 nM | 313 nM | 1250 nM | 5000 nM | (μM) |
| 1232737 | 98 | 73 | 75 | 54 | 42 | 2.15 |
| 1241698 | 80 | 66 | 39 | 21 | 14 | 0.19 |
| 1241864 | 83 | 84 | 59 | 27 | 13 | 0.39 |
| 1241983 | 91 | 95 | 43 | 37 | 13 | 0.45 |
| 1241984 | 80 | 82 | 55 | 27 | 11 | 0.34 |
| 1242079 | 96 | 90 | 55 | 30 | 21 | 0.54 |
| 1242104 | 113 | 103 | 97 | 62 | 36 | 3.06 |
| 1242200 | 83 | 75 | 51 | 25 | 11 | 0.29 |
| 1242488 | 102 | 92 | 69 | 35 | 20 | 0.74 |
| 1242560 | 87 | 79 | 46 | 25 | 8 | 0.29 |
| 1242632 | 106 | 52 | 43 | 19 | 9 | 0.24 |
| 1242656 | 90 | 59 | 49 | 27 | 11 | 0.26 |
| 1242727 | 116 | 96 | 67 | 39 | 14 | 0.74 |
| 1242823 | 89 | 71 | 57 | 30 | 18 | 0.39 |
| 1242895 | 133 | 89 | 59 | 30 | 26 | 0.76 |

TABLE 26
Dose-dependent reduction of human NLRP3 RNA
in THP-1 cells by modified oligonucleotides

| Compound | NLRP3 RNA (% UTC) | | | | | IC₅₀ |
|---|---|---|---|---|---|---|
| No. | 20 nM | 78 nM | 313 nM | 1250 nM | 5000 nM | (μM) |
| 1232737 | 88 | 94 | 68 | 54 | 42 | 2.32 |
| 1241578 | 83 | 59 | 42 | 26 | 12 | 0.20 |
| 1241694 | 84 | 69 | 34 | 18 | 8 | 0.19 |
| 1242244 | 93 | 83 | 47 | 21 | 9 | 0.33 |
| 1242460 | 121 | 93 | 52 | 16 | 6 | 0.44 |
| 1242484 | 84 | 70 | 38 | 13 | 6 | 0.19 |
| 1242652 | 118 | 79 | 45 | 12 | 6 | 0.34 |
| 1242747 | 92 | 63 | 40 | 33 | 14 | 0.28 |
| 1242819 | 98 | 73 | 48 | 18 | 10 | 0.30 |

TABLE 27
Dose-dependent reduction of human NLRP3 RNA
in THP-1 cells by modified oligonucleotides

| Compound | NLRP3 RNA (% UTC) | | | | | IC₅₀ |
|---|---|---|---|---|---|---|
| No. | 16 nM | 63 nM | 250 nM | 1000 nM | 4000 nM | (μM) |
| 1232737 | 68 | 93 | 77 | 62 | 45 | >4.0 |
| 1299642 | 60 | 66 | 66 | 36 | 10 | 0.19 |
| 1299643 | 95 | 76 | 68 | 41 | 13 | 0.45 |
| 1299658 | 112 | 89 | 52 | 26 | 15 | 0.40 |
| 1299684 | 90 | 83 | 56 | 30 | 15 | 0.34 |
| 1299767 | 87 | 60 | 56 | 38 | 21 | 0.31 |
| 1300450 | 90 | 94 | 58 | 33 | 21 | 0.48 |
| 1300481 | 102 | 92 | 68 | 49 | 12 | 0.62 |
| 1300485 | 76 | 106 | 59 | 39 | 20 | 0.55 |
| 1300623 | 88 | 97 | 73 | 46 | 12 | 0.62 |
| 1300883 | 106 | 85 | 67 | 43 | 28 | 0.74 |
| 1301256 | 132 | 88 | 67 | 44 | 16 | 0.66 |
| 1301292 | 118 | 77 | 61 | 26 | 19 | 0.43 |
| 1301314 | 100 | 70 | 68 | 39 | 16 | 0.45 |
| 1301324 | 86 | 67 | 51 | 49 | 31 | 0.53 |

TABLE 28
Dose-dependent reduction of human NLRP3 RNA
in THP-1 cells by modified oligonucleotides

| Compound | NLRP3 RNA (% UTC) | | | | | IC₅₀ |
|---|---|---|---|---|---|---|
| No. | 16 nM | 63 nM | 250 nM | 1000 nM | 4000 nM | (μM) |
| 1232737 | 70 | 83 | 72 | 46 | 39 | 1.34 |
| 1299659 | 85 | 104 | 65 | 27 | 11 | 0.42 |
| 1300409 | 92 | 67 | 81 | 49 | 20 | 0.69 |
| 1300431 | 83 | 58 | 65 | 30 | 11 | 0.24 |
| 1300489 | 91 | 87 | 92 | 52 | 31 | 1.61 |
| 1300567 | 66 | 73 | 78 | 69 | 39 | >4.0 |
| 1300657 | 118 | 98 | 67 | 36 | 13 | 0.57 |
| 1300899 | 83 | 78 | 67 | 41 | 16 | 0.44 |
| 1301085 | 88 | 71 | 70 | 62 | 27 | 1.05 |
| 1301092 | 101 | 89 | 65 | 34 | 14 | 0.48 |
| 1301228 | 73 | 72 | 69 | 46 | 22 | 0.50 |
| 1301238 | 76 | 75 | 68 | 47 | 15 | 0.44 |
| 1301274 | 79 | 63 | 45 | 38 | 20 | 0.22 |
| 1301281 | 103 | 97 | 54 | 39 | 22 | 0.57 |
| 1301346 | 89 | 75 | 64 | 68 | 29 | 1.30 |

TABLE 29
Dose-dependent reduction of human NLRP3 RNA
in THP-1 cells by modified oligonucleotides

| Compound | NLRP3 RNA (% UTC) | | | | | IC₅₀ |
|---|---|---|---|---|---|---|
| No. | 16 nM | 63 nM | 250 nM | 1000 nM | 4000 nM | (μM) |
| 1232737 | 91 | 88 | 91 | 71 | 38 | >4.0 |
| 1299527 | 110 | 86 | 35 | 47 | 20 | 0.46 |
| 1299802 | 110 | 66 | 68 | 18 | 15 | 0.34 |
| 1299865 | 83 | 67 | 30 | 32 | 7 | 0.16 |
| 1300390 | 88 | 92 | 47 | 50 | 20 | 0.50 |
| 1300410 | 52 | 66 | 72 | 50 | 16 | 0.31 |
| 1300422 | 49 | 62 | 57 | 26 | 13 | 0.09 |
| 1300447 | 105 | 104 | 75 | 41 | 13 | 0.68 |
| 1300576 | 113 | 79 | 67 | 36 | 15 | 0.50 |
| 1300578 | 87 | 61 | 42 | 24 | 6 | 0.17 |
| 1300595 | 54 | 78 | 77 | 42 | 16 | 0.38 |
| 1300701 | 49 | 101 | 51 | 38 | 12 | 0.25 |
| 1300886 | 96 | 71 | 44 | 26 | 20 | 0.27 |
| 1301108 | 90 | 86 | 35 | 30 | 8 | 0.25 |
| 1301210 | 72 | 60 | 68 | 51 | 22 | 0.45 |

TABLE 30
Dose-dependent reduction of human NLRP3 RNA
in THP-1 cells by modified oligonucleotides

| Compound | NLRP3 RNA (% UTC) | | | | | IC₅₀ |
|---|---|---|---|---|---|---|
| No. | 16 nM | 63 nM | 250 nM | 1000 nM | 4000 nM | (μM) |
| 1232737 | 58 | 94 | 74 | 70 | 27 | 2.58 |
| 1299496 | 84 | 63 | 75 | 29 | 28 | 0.44 |
| 1299617 | 58 | 76 | 39 | 51 | 22 | 0.22 |
| 1299663 | 104 | 77 | 39 | 36 | 22 | 0.36 |
| 1299670 | 82 | 94 | 54 | 34 | 17 | 0.40 |
| 1299797 | 95 | 97 | 53 | 35 | 15 | 0.44 |
| 1300424 | 102 | 69 | 50 | 16 | 9 | 0.24 |
| 1300472 | 102 | 44 | 63 | 31 | 16 | 0.27 |
| 1300625 | 102 | 57 | 45 | 51 | 42 | 0.69 |
| 1300859 | 99 | 99 | 62 | 36 | 21 | 0.58 |
| 1301153 | 123 | 85 | 84 | 47 | 22 | 0.91 |
| 1301158 | 67 | 80 | 63 | 42 | 18 | 0.37 |
| 1301199 | 48 | 66 | 57 | 44 | 22 | 0.15 |
| 1301207 | 103 | 68 | 48 | 47 | 20 | 0.42 |
| 1301283 | 135 | 110 | 86 | 44 | 14 | 0.88 |

TABLE 31
Dose-dependent reduction of human NLRP3 RNA
in THP-1 cells by modified oligonucleotides

| Compound | NLRP3 RNA (% UTC) | | | | | IC₅₀ |
|---|---|---|---|---|---|---|
| No. | 16 nM | 63 nM | 250 nM | 1000 nM | 4000 nM | (μM) |
| 1232737 | 82 | 68 | 80 | 57 | 42 | 2.84 |
| 1299715 | 80 | 75 | 53 | 34 | 16 | 0.28 |
| 1299840 | 96 | 121 | 103 | 48 | 42 | 2.86 |
| 1300266 | 53 | 74 | 52 | 30 | 21 | 0.15 |
| 1300382 | 52 | 45 | 47 | 42 | 29 | 0.04 |
| 1300385 | 95 | 73 | 60 | 47 | 27 | 0.61 |
| 1300448 | 88 | 85 | 76 | 48 | 27 | 0.93 |
| 1300513 | 100 | 85 | 53 | 29 | 18 | 0.39 |
| 1300580 | 78 | 64 | 55 | 36 | 17 | 0.25 |
| 1300655 | 47 | 65 | 48 | 23 | 20 | 0.06 |
| 1300685 | 91 | 79 | 63 | 40 | 24 | 0.53 |
| 1300816 | 105 | 72 | 83 | 38 | 63 | 3.25 |
| 1300889 | 126 | 109 | 92 | 70 | 31 | 2.14 |
| 1301018 | 112 | 105 | 104 | 76 | 42 | >4.0 |
| 1301277 | 42 | 85 | 69 | 41 | 22 | 0.33 |

TABLE 32
Dose-dependent reduction of human NLRP3 RNA
in THP-1 cells by modified oligonucleotides

| Compound | NLRP3 RNA (% UTC) | | | | | IC₅₀ |
|---|---|---|---|---|---|---|
| No. | 16 nM | 63 nM | 250 nM | 1000 nM | 4000 nM | (μM) |
| 1232737 | 122 | 107 | 85 | 70 | 52 | >4.0 |
| 1299657 | 128 | 74 | 52 | 26 | 7 | 0.36 |
| 1299673 | 86 | 72 | 52 | 28 | 9 | 0.24 |
| 1299796 | 89 | 74 | 63 | 44 | 23 | 0.53 |
| 1299804 | 76 | 60 | 67 | 34 | 19 | 0.29 |
| 1300373 | 46 | 80 | 69 | 43 | 24 | 0.37 |
| 1300440 | 46 | 85 | 41 | 32 | 20 | 0.12 |
| 1300441 | 51 | 78 | 45 | 34 | 22 | 0.14 |
| 1300503 | 95 | 81 | 70 | 63 | 16 | 0.82 |
| 1300875 | 89 | 77 | 58 | 40 | 21 | 0.43 |
| 1300876 | 58 | 80 | 48 | 34 | 12 | 0.17 |
| 1300892 | 47 | 62 | 39 | 34 | 13 | 0.05 |
| 1300900 | 157 | 118 | 76 | 50 | 22 | 1.04 |
| 1301165 | 100 | 86 | 58 | 29 | 17 | 0.41 |
| 1301266 | 91 | 127 | 116 | 41 | 36 | 2.43 |

TABLE 33
Dose-dependent reduction of human NLRP3 RNA
in THP-1 cells by modified oligonucleotides

| Compound | NLRP3 RNA (% UTC) | | | | | IC₅₀ |
|---|---|---|---|---|---|---|
| No. | 16 nM | 63 nM | 250 nM | 1000 nM | 4000 nM | (μM) |
| 1232737 | 87 | 78 | 78 | 64 | 38 | 2.62 |
| 1299944 | 79 | 79 | 61 | 39 | 22 | 0.43 |
| 1300261 | 83 | 65 | 39 | 36 | 31 | 0.28 |
| 1300299 | 63 | 76 | 49 | 35 | 16 | 0.20 |
| 1300411 | 84 | 81 | 76 | 64 | 35 | 2.12 |
| 1300477 | 73 | 72 | 49 | 21 | 6 | 0.16 |
| 1300540 | 97 | 86 | 69 | 39 | 23 | 0.62 |
| 1300568 | 105 | 89 | 76 | 47 | 19 | 0.76 |
| 1300668 | 74 | 58 | 60 | 37 | 14 | 0.22 |
| 1300897 | 74 | 62 | 34 | 21 | 12 | 0.12 |
| 1301213 | 93 | 83 | 67 | 35 | 14 | 0.44 |
| 1301265 | 70 | 70 | 58 | 44 | 18 | 0.31 |
| 1301289 | 108 | 100 | 74 | 46 | 15 | 0.72 |
| 1304709 | 80 | 63 | 35 | 16 | 9 | 0.12 |
| 1304758 | 66 | 75 | 49 | 31 | 16 | 0.20 |

TABLE 34
Dose-dependent reduction of human NLRP3 RNA
in THP-1 cells by modified oligonucleotides

| Compound | NLRP3 RNA (% UTC) | | | | | IC₅₀ |
|---|---|---|---|---|---|---|
| No. | 16 nM | 63 nM | 250 nM | 1000 nM | 4000 nM | (μM) |
| 1232737 | 88 | 87 | 72 | 65 | 48 | >4.0 |
| 1304685 | 81 | 78 | 53 | 35 | 15 | 0.30 |
| 1304686 | 68 | 57 | 55 | 43 | 25 | 0.24 |
| 1304689 | 66 | 61 | 48 | 33 | 11 | 0.14 |
| 1304726 | 87 | 82 | 56 | 34 | 18 | 0.37 |
| 1304728 | 124 | 97 | 77 | 40 | 11 | 0.66 |
| 1304730 | 77 | 37 | 30 | 15 | 7 | 0.06 |
| 1304739 | 87 | 79 | 62 | 21 | 10 | 0.28 |
| 1304745 | 68 | 76 | 60 | 39 | 9 | 0.26 |
| 1304751 | 100 | 92 | 30 | 34 | 19 | 0.34 |
| 1304763 | 81 | 63 | 73 | 46 | 18 | 0.45 |
| 1304774 | 90 | 75 | 55 | 38 | 15 | 0.35 |
| 1304790 | 83 | 68 | 58 | 38 | 18 | 0.32 |
| 1304795 | 81 | 97 | 74 | 37 | 24 | 0.68 |
| 1304798 | 56 | 57 | 55 | 33 | 14 | 0.10 |

TABLE 35
Dose-dependent reduction of human NLRP3 RNA
in THP-1 cells by modified oligonucleotides

| Compound | NLRP3 RNA (% UTC) | | | | | IC₅₀ |
|---|---|---|---|---|---|---|
| No. | 16 nM | 63 nM | 250 nM | 1000 nM | 4000 nM | (μM) |
| 1232737 | 95 | 79 | 73 | 57 | 40 | 1.85 |
| 1299705 | 115 | 102 | 75 | 34 | 13 | 0.62 |
| 1299857 | 92 | 73 | 52 | 27 | 16 | 0.29 |
| 1299941 | 85 | 67 | 53 | 25 | 11 | 0.22 |
| 1300317 | 80 | 66 | 57 | 36 | 18 | 0.29 |
| 1300349 | 88 | 69 | 50 | 29 | 15 | 0.25 |
| 1300529 | 87 | 80 | 55 | 33 | 11 | 0.31 |
| 1300562 | 78 | 74 | 51 | 23 | 9 | 0.20 |
| 1300572 | 58 | 71 | 47 | 22 | 10 | 0.11 |
| 1300636 | 83 | 61 | 35 | 22 | 14 | 0.14 |
| 1300691 | 84 | 71 | 60 | 43 | 33 | 0.60 |
| 1300695 | 85 | 100 | 76 | 41 | 24 | 0.78 |
| 1300797 | 77 | 61 | 46 | 30 | 17 | 0.18 |
| 1300984 | 106 | 48 | 50 | 25 | 9 | 0.21 |
| 1301336 | 75 | 66 | 46 | 23 | 11 | 0.16 |

TABLE 36
Dose-dependent reduction of human NLRP3 RNA
in THP-1 cells by modified oligonucleotides

| Compound | NLRP3 RNA (% UTC) | | | | | IC₅₀ |
|---|---|---|---|---|---|---|
| No. | 16 nM | 63 nM | 250 nM | 1000 nM | 4000 nM | (μM) |
| 1232737 | 90 | 101 | 81 | 57 | 41 | 2.68 |
| 1299683 | 88 | 89 | 71 | 39 | 15 | 0.51 |
| 1299709 | 90 | 75 | 50 | 22 | 6 | 0.23 |
| 1299773 | 112 | 92 | 64 | 27 | 17 | 0.49 |
| 1299805 | 87 | 73 | 45 | 22 | 9 | 0.21 |
| 1300539 | 56 | 60 | 32 | 19 | 10 | 0.06 |
| 1300635 | 84 | 69 | 47 | 25 | 12 | 0.21 |
| 1300707 | 91 | 71 | 53 | 24 | 8 | 0.24 |
| 1300974 | 93 | 77 | 55 | 24 | 13 | 0.29 |
| 1300981 | 120 | 96 | 56 | 32 | 13 | 0.49 |
| 1301074 | 86 | 72 | 49 | 22 | 10 | 0.21 |
| 1301075 | 86 | 74 | 47 | 27 | 19 | 0.27 |
| 1301113 | 81 | 78 | 71 | 46 | 23 | 0.62 |
| 1301162 | 91 | 80 | 46 | 25 | 15 | 0.28 |
| 1301204 | 108 | 93 | 63 | 28 | 11 | 0.44 |

### Example 8: Tolerability of Modified Oligonucleotides Complementary to Human NLRP3 in Wildtype Mice

[0360] Wildtype BALB/c mice (Jackson Laboratory) were treated with modified oligonucleotides selected from studies described above and evaluated for changes in the levels of various plasma chemistry markers.

### Study 1

### Treatment

[0361] Groups of four male BALB/c mice each were injected subcutaneously once a week for five weeks (for a total of six treatments) with 100 mg/kg of modified oligonucleotides. One group of four male BALB/c mice was injected with PBS. The mice were euthanized seventy-two hours post the final administration of modified oligonucleotide.

### Plasma Chemistry Markers

[0362] To evaluate the effect of modified oligonucleotides on liver and kidney function, plasma levels of alanine aminotransferase (ALT), aspartate aminotransferase (AST), blood urea nitrogen (BUN), total bilirubin (TBIL), Albumin (ALB), and Creatinine (CREA) were measured on the day the mice were sacrificed (day 37) using an automated clinical chemistry analyzer (Hitachi Olympus AU400c, Melville, NY). The results were averaged for each group of mice and are presented in the tables below. Modified oligonucleotides that caused changes in the levels of any of the liver or kidney function markers outside the expected range for modified oligonucleotides were excluded from further studies.

TABLE 37
Plasma chemistry markers in BALB/c mice

| | Plasma clinical chemistry | | | | | |
|---|---|---|---|---|---|---|
| Compound | ALT | AST | BUN | TBIL | ALB | CREA |
| No. | (U/L) | (U/L) | (mg/dL) | (mg/dL) | (g/dL) | (mg/dL) |
| PBS | 20 | 39 | 26 | 0.14 | 2.8 | 0.11 |
| 1232844 | 87 | 148 | 25 | 0.16 | 2.67 | 0.13 |
| 1233100 | 46 | 58 | 28 | 0.15 | 2.44 | 0.12 |
| 1233104 | 151 | 179 | 22 | 0.12 | 2.38 | 0.09 |
| 1233105 | 36 | 57 | 28 | 0.12 | 2.53 | 0.15 |
| 1233144 | 967 | 732 | 25 | 0.65 | 2.96 | 0.15 |
| 1233279 | 30 | 58 | 21 | 0.14 | 2.57 | 0.1 |
| 1242446 | 55 | 99 | 24 | 0.12 | 2.27 | 0.09 |
| 1242447 | 24 | 46 | 26 | 0.13 | 2.54 | 0.1 |
| 1242484 | 83 | 88 | 24 | 0.11 | 2.59 | 0.1 |
| 1242543 | 134 | 171 | 31 | 0.12 | 2.42 | 0.11 |
| 1242553 | 1085 | 959 | 27 | 0.34 | 2.69 | 0.11 |

### Hematology Assays

[0363] Blood obtained from mice at week 5 were sent to IDEXX BioResearch for measurement of blood cell counts. Counts taken include red blood cell (RBC) count, white blood cell (WBC) count, hemoglobin (HGB), hematocrit (HCT), Mean corpuscular volume (MCV), mean corpuscular hemoglobin (MCH), and mean corpuscular hemoglobin concentration (MCHC). Individual white blood cell counts, such as that of monocytes (MON), neutrophils (NEU), lymphocytes (LYM), eosinophils (EOS), basophils (BAS), reticulocytes (RETI), and platelets (PLT) were evaluated. The results are presented in the tables below. Modified oligonucleotides that caused changes in the blood cell count outside the expected range were excluded in further studies.

TABLE 38
Hematology Parameters in BALB/c mice

| Compound | WBC | RBC | HGB | HCT | MCV | MCH |
|---|---|---|---|---|---|---|
| No. | (10\hat{ }3/μL) | (10\hat{ }12/L) | (g/dL) | (%) | (fL) | (pg) |
| PBS | 8 | 10 | 16 | 45 | 45 | 16 |
| 1232844 | 8 | 10 | 16 | 44 | 42 | 15 |
| 1233100 | 4 | 9 | 15 | 44 | 48 | 16 |
| 1233104 | 6 | 9 | 14 | 41 | 45 | 16 |
| 1233105 | 6 | 9 | 14 | 41 | 46 | 16 |
| 1233144 | 13 | 9 | 13 | 37 | 44 | 15 |
| 1233279 | 6 | 9 | 14 | 40 | 45 | 16 |
| 1242446 | 5 | 8 | 12 | 38 | 48 | 15 |
| 1242447 | 6 | 9 | 14 | 42 | 48 | 16 |
| 1242484 | 7 | 9 | 15 | 44 | 47 | 16 |
| 1242543 | 7 | 9 | 14 | 40 | 45 | 16 |
| 1242553 | 6 | 9 | 14 | 41 | 43 | 15 |

TABLE 39
Blood Cell Counts in BALB/c mice

| Compound | NEU | LYM | MON | EOS | BAS | RETI | PLT |
|---|---|---|---|---|---|---|---|
| No. | (10\hat{ }3/μL) | (10\hat{ }3/μL) | (10\hat{ }3/μL) | (10\hat{ }3/μL) | (10\hat{ }3/μL) | (10\hat{ }3/μL) | (10\hat{ }9/L) |
| PBS | 1163 | 6393 | 437 | 106 | 2 | 341 | 1207 |
| 1232844 | 2419 | 4908 | 585 | 208 | 4 | 435 | 525 |
| 1233100 | 1238 | 2431 | 290 | 90 | 2 | 311 | 1120 |
| 1233104 | 3017 | 2627 | 483 | 44 | 5 | 273 | 798 |
| 1233105 | 1001 | 4847 | 450 | 78 | 0 | 306 | 827 |
| 1233144 | 3066 | 8573 | 879 | 382 | 0 | 395 | 869 |
| 1233279 | 1675 | 4183 | 440 | 121 | 7 | 296 | 979 |
| 1242446 | 2347 | 2519 | 237 | 42 | 5 | 345 | 1023 |
| 1242447 | 1522 | 3624 | 436 | 114 | 8 | 598 | 1401 |
| 1242484 | 1515 | 4598 | 330 | 105 | 2 | 354 | 1344 |
| 1242543 | 1815 | 4128 | 508 | 96 | 4 | 272 | 815 |
| 1242553 | 1661 | 3810 | 523 | 128 | 4 | 331 | 722 |

### Body and Organ Weights

[0364] Body weights of BALB/c mice were measured on days 1 and 37, and the average body weight for each group is presented in the table below. Liver, kidney, and spleen weights were measured on the day the mice were sacrificed (day 37), and the average organ weights for each group are presented in the tables below. Modified oligonucleotides that caused any changes in organ weights outside the expected range for modified oligonucleotides were excluded from further studies.

TABLE 40
Body and organ weights (in grams)

| Compound | Body weight (g) | | Organ weight (g) | | |
|---|---|---|---|---|---|
| No. | Day 1 | Day 37 | Liver | Kidney | Spleen |
| PBS | 26 | 30 | 1.43 | 0.52 | 0.09 |
| 1232844 | 27 | 29 | 1.79 | 0.51 | 0.26 |
| 1233100 | 25 | 29 | 1.58 | 0.47 | 0.12 |
| 1233104 | 26 | 29 | 1.79 | 0.52 | 0.12 |
| 1233105 | 25 | 28 | 1.41 | 0.44 | 0.11 |
| 1233144 | 26 | 25 | 1.77 | 0.41 | 0.17 |
| 1233279 | 25 | 29 | 1.37 | 0.46 | 0.11 |
| 1242446 | 25 | 27 | 1.75 | 0.47 | 0.17 |
| 1242447 | 26 | 30 | 1.81 | 0.47 | 0.19 |
| 1242484 | 27 | 33 | 1.92 | 0.57 | 0.12 |
| 1242543 | 27 | 31 | 1.76 | 0.48 | 0.14 |
| 1242553 | 27 | 29 | 1.52 | 0.49 | 0.2 |

### Study 2

### Treatment

[0365] Groups of four male BALB/c mice each were injected subcutaneously once a week for five weeks (for a total of six treatments) with 100 mg/kg of modified oligonucleotides. One group of four male BALB/c mice was injected with PBS. The mice were euthanized seventy-two hours post the final administration of modified oligonucleotide.

### Plasma Chemistry Markers

[0366] To evaluate the effect of modified oligonucleotides on liver and kidney function, plasma levels of alanine aminotransferase (ALT), aspartate aminotransferase (AST), blood urea nitrogen (BUN), total bilirubin (TBIL), Albumin (ALB), and Creatinine (CREA) were measured on the day the mice were sacrificed (day 37) using an automated clinical chemistry analyzer (Hitachi Olympus AU400c, Melville, NY). The results were averaged for each group of mice and are presented in the tables below. Modified oligonucleotides that caused changes in the levels of any of the liver or kidney function markers outside the expected range for modified oligonucleotides were excluded from further studies.

TABLE 41
Plasma chemistry markers in BALB/c mice

| | Plasma clinical chemistry | | | | | |
|---|---|---|---|---|---|---|
| Compound | ALT | AST | BUN | TBIL | ALB | CREA |
| No. | (U/L) | (U/L) | (mg/dL) | (mg/dL) | (g/dL) | (mg/dL) |
| PBS | 20 | 43 | 21 | 0.18 | 2.79 | 0.13 |
| 1232846 | 1391 | 1434 | 25 | 0.13 | 2.7 | 0.16 |
| 1241470 | 1318 | 1292 | 27 | 0.23 | 3.05 | 0.16 |
| 1242482 | 1915 | 1664 | 24 | 0.27 | 3.14 | 0.17 |
| 1242538 | 36 | 67 | 22 | 0.13 | 2.74 | 0.16 |
| 1242546 | 57 | 101 | 23 | 0.11 | 2.59 | 0.13 |
| 1242547 | 192 | 242 | 25 | 0.14 | 2.68 | 0.17 |
| 1242579 | 36 | 57 | 21 | 0.1 | 2.76 | 0.15 |
| 1242601 | 117 | 187 | 25 | 0.12 | 2.97 | 0.17 |
| 1242624 | 1615 | 1452 | 24 | 0.21 | 2.73 | 0.15 |
| 1242633 | 175 | 307 | 21 | 0.12 | 2.79 | 0.15 |

### Hematology Assays

[0367] Blood obtained from mice at week 5 were sent to IDEXX BioResearch for measurement of blood cell counts. Counts taken include red blood cell (RBC) count, white blood cell (WBC) count, hemoglobin (HGB), hematocrit (HCT), Mean corpuscular volume (MCV), mean corpuscular hemoglobin (MCH), and mean corpuscular hemoglobin concentration (MCHC). Individual white blood cell counts, such as that of monocytes (MON), neutrophils (NEU), lymphocytes (LYM), eosinophils (EOS), basophils (BAS), reticulocytes (RETI), and platelets (PLT) were evaluated. The results are presented in the tables below. Modified oligonucleotides that caused changes in the blood cell count outside the expected range were excluded in further studies.

TABLE 42
Hematology Parameters in BALB/c mice

| Compound | WBC | RBC | HGB | HCT | MCV | MCH | MCHC |
|---|---|---|---|---|---|---|---|
| No. | (10\hat{ }3/μL) | (10\hat{ }12/L) | (g/dL) | (%) | (fL) | (pg) | (%) |
| PBS | 7 | 10 | 15 | 42 | 44 | 16 | 36 |
| 1232846 | 12 | 10 | 15 | 42 | 42 | 15 | 36 |
| 1241470 | 9 | 8 | 12 | 34 | 42 | 15 | 36 |
| 1242482 | 7 | 9 | 13 | 36 | 43 | 15 | 36 |
| 1242538 | 7 | 10 | 14 | 40 | 42 | 15 | 36 |
| 1242546 | 8 | 10 | 15 | 42 | 43 | 15 | 36 |
| 1242547 | 7 | 9 | 14 | 38 | 41 | 15 | 36 |
| 1242579 | 6 | 9 | 15 | 41 | 43 | 15 | 36 |
| 1242601 | 10 | 10 | 14 | 40 | 42 | 15 | 36 |
| 1242624 | 10 | 8 | 13 | 35 | 42 | 15 | 36 |
| 1242633 | 8 | 10 | 15 | 42 | 42 | 15 | 37 |

TABLE 43
Blood Cell Counts in BALB/c mice

| Compound | NEU | LYM | MON | EOS | BAS | RETI | PLT |
|---|---|---|---|---|---|---|---|
| No. | (10\hat{ }3/μL) | (10\hat{ }3/μL) | (10\hat{ }3/μL) | (10\hat{ }3/μL) | (10\hat{ }3/μL) | (10\hat{ }3/μL) | (10\hat{ }9/L) |
| PBS | 1560 | 5176 | 541 | 94 | 4 | 369 | 1168 |
| 1232846 | 2483 | 8223 | 1359 | 145 | 15 | 268 | 828 |
| 1241470 | 2431 | 5400 | 1097 | 118 | 4 | 256 | 989 |
| 1242482 | 1243 | 4975 | 709 | 118 | 5 | 303 | 875 |
| 1242538 | 1296 | 5167 | 703 | 224 | 10 | 365 | 809 |
| 1242546 | 1366 | 6173 | 766 | 167 | 4 | 350 | 664 |
| 1242547 | 1593 | 4423 | 792 | 87 | 6 | 273 | 508 |
| 1242579 | 1565 | 3454 | 541 | 114 | 2 | 290 | 1071 |
| 1242601 | 2110 | 7204 | 823 | 228 | 11 | 318 | 832 |
| 1242624 | 1691 | 6728 | 940 | 186 | 6 | 279 | 979 |
| 1242633 | 1503 | 5728 | 680 | 235 | 4.25 | 324 | 947 |

### Body and Organ Weights

[0368] Body weights of BALB/c mice were measured on days 1 and 37, and the average body weight for each group is presented in the table below. Liver, kidney, and spleen weights were measured on the day the mice were sacrificed (day 37), and the average organ weights for each group are presented in the tables below. Modified oligonucleotides that caused any changes in organ weights outside the expected range for modified oligonucleotides were excluded from further studies.

TABLE 44
Body and organ weights (in grams)

| Compound | Body weight (g) | | Organ weight (g) | | |
|---|---|---|---|---|---|
| No. | Day 1 | Day 37 | Liver | Kidney | Spleen |
| PBS | 29 | 32 | 1.56 | 0.55 | 0.09 |
| 1232846 | 27 | 30 | 2.41 | 0.47 | 0.15 |
| 1241470 | 28 | 31 | 2.26 | 0.51 | 0.10 |
| 1242482 | 26 | 30 | 2.22 | 0.47 | 0.11 |
| 1242538 | 27 | 30 | 1.67 | 0.51 | 0.12 |
| 1242546 | 27 | 31 | 1.56 | 0.46 | 0.11 |
| 1242547 | 24 | 27 | 1.35 | 0.40 | 0.15 |
| 1242579 | 26 | 30 | 1.51 | 0.47 | 0.10 |
| 1242601 | 27 | 29 | 1.31 | 0.43 | 0.11 |
| 1242624 | 27 | 26 | 1.31 | 0.48 | 0.11 |
| 1242633 | 25 | 28 | 1.59 | 0.42 | 0.12 |

### Study 3

### Treatment

[0369] Groups of four male BALB/c mice each were injected subcutaneously once a week for five weeks (for a total of six treatments) with 100 mg/kg of modified oligonucleotides. One group of four male BALB/c mice was injected with PBS. The mice were euthanized seventy-two hours post the final administration of modified oligonucleotide.

### Plasma Chemistry Markers

[0370] To evaluate the effect of modified oligonucleotides on liver and kidney function, plasma levels of alanine aminotransferase (ALT), aspartate aminotransferase (AST), blood urea nitrogen (BUN), total bilirubin (TBIL), Albumin (ALB), and Creatinine (CREA) were measured on the day the mice were sacrificed (day 39) using an automated clinical chemistry analyzer (Hitachi Olympus AU400c, Melville, NY). The results were averaged for each group of mice and are presented in the tables below. Modified oligonucleotides that caused changes in the levels of any of the liver or kidney function markers outside the expected range for modified oligonucleotides were excluded from further studies.

TABLE 45
Plasma chemistry markers in BALB/c mice

| | Plasma clinical chemistry | | | | | |
|---|---|---|---|---|---|---|
| Compound | ALT | AST | BUN | TBIL | ALB | CREA |
| No. | (U/L) | (U/L) | (mg/dL) | (mg/dL) | (g/dL) | (mg/dL) |
| PBS | 21 | 45 | 22 | 0.15 | 2.64 | 0.11 |
| 1299773 | 66 | 106 | 19 | 0.17 | 2.7 | 0.12 |
| 1299805 | 366 | 650 | 22 | 0.2 | 2.75 | 0.14 |
| 1299941 | 954 | 898 | 17 | 0.16 | 2.34 | 0.1 |
| 1300572 | 3076 | 2593 | 21 | 1.07 | 3.13 | 0.11 |
| 1300578 | 137 | 284 | 21 | 0.16 | 2.88 | 0.1 |
| 1300984 | 295 | 570 | 23 | 0.14 | 2.53 | 0.13 |
| 1301108 | 394 | 588 | 21 | 0.14 | 2.42 | 0.09 |
| 1304745 | 31 | 63 | 22 | 0.14 | 2.53 | 0.1 |
| 1304758 | 4656 | 3068 | 28 | 0.32 | 2.76 | 0.12 |
| 1304790 | 2253 | 3201 | 28 | 0.56 | 2.37 | 0.1 |

### Hematology Assays

[0371] Blood obtained from mice at week 5 were sent to IDEXX BioResearch for measurement of blood cell counts. Counts taken include red blood cell (RBC) count, white blood cell (WBC) count, hemoglobin (HGB), hematocrit (HCT), Mean corpuscular volume (MCV), mean corpuscular hemoglobin (MCH), and mean corpuscular hemoglobin concentration (MCHC). Individual white blood cell counts, such as that of monocytes (MON), neutrophils (NEU), lymphocytes (LYM), eosinophils (EOS), basophils (BAS), reticulocytes (RETI), and platelets (PLT) were evaluated. The results are presented in the tables below. Modified oligonucleotides that caused changes in the blood cell count outside the expected range were excluded in further studies.

TABLE 46
Hematology Parameters in BALB/c mice

| Compound | WBC | RBC | HGB | HCT | MCV | MCH | MCHC |
|---|---|---|---|---|---|---|---|
| No. | (10\hat{ }3/μL) | (10\hat{ }12/L) | (g/dL) | (%) | (fL) | (pg) | (%) |
| PBS | 4.5 | 10 | 15 | 43 | 45 | 15 | 34 |
| 1299773 | 7.18 | 10 | 14 | 42 | 43 | 15 | 34 |
| 1299805 | 7.85 | 9 | 14 | 40 | 43 | 15 | 35 |
| 1299941 | 7.35 | 9 | 14 | 39 | 43 | 15 | 35 |
| 1300572 | 12.23 | 10 | 14 | 41 | 43 | 14 | 34 |
| 1300578 | 6.95 | 10 | 15 | 43 | 43 | 15 | 35 |
| 1300984 | 7.1 | 10 | 14 | 42 | 43 | 15 | 35 |
| 1301108 | 6.33 | 10 | 14 | 42 | 43 | 15 | 34 |
| 1304745 | 5.55 | 9 | 14 | 41 | 43 | 15 | 34 |
| 1304758 | 12.15 | 10 | 14 | 42 | 42 | 14 | 34 |
| 1304790 | 6.78 | 9 | 12 | 38 | 41 | 14 | 33 |

TABLE 47
Blood Cell Counts in BALB/c mice

| Compound | NEU | LYM | MON | EOS | BAS | RETI | PLT |
|---|---|---|---|---|---|---|---|
| No. | (10\hat{ }3/μL) | (10\hat{ }3/μL) | (10\hat{ }3/μL) | (10\hat{ }3/μL) | (10\hat{ }3/μL) | (10\hat{ }3/μL) | (10\hat{ }9/L) |
| PBS | 942 | 3224 | 214 | 120 | 0 | 432 | 1017 |
| 1299773 | 1287 | 5084 | 443 | 357 | 4 | 388 | 711 |
| 1299805 | 1399 | 5653 | 489 | 306 | 3 | 426 | 772 |
| 1299941 | 2097 | 4535 | 628 | 89 | 2 | 387 | 783 |
| 1300572 | 2292 | 8468 | 793 | 670 | 3 | 735 | 658 |
| 1300578 | 1348 | 4547 | 418 | 636 | 0 | 423 | 954 |
| 1300984 | 1443 | 4662 | 517 | 472 | 7 | 386 | 774 |
| 1301108 | 1070 | 4332 | 520 | 400 | 4 | 386 | 939 |
| 1304745 | 1137 | 3639 | 358 | 414 | 3 | 419 | 930 |
| 1304758 | 2064 | 8071 | 1118 | 887 | 10 | 465 | 1074 |
| 1304790 | 1904 | 4006 | 617 | 246 | 3 | 502 | 798 |

### Body and Organ Weights

[0372] Body weights of BALB/c mice were measured on days 1 and 39, and the average body weight for each group is presented in the table below. Liver, kidney, and spleen weights were measured on the day the mice were sacrificed (day 39), and the average organ weights for each group are presented in the tables below. Modified oligonucleotides that caused any changes in organ weights outside the expected range for modified oligonucleotides were excluded from further studies.

TABLE 48
Body and organ weights (in grams)

| Compound | Body weight (g) | | Organ weight (g) | | |
|---|---|---|---|---|---|
| No. | Day 1 | Day 39 | Liver | Kidney | Spleen |
| PBS | 22 | 28 | 1.35 | 0.46 | 0.09 |
| 1299773 | 20 | 24 | 1.27 | 0.40 | 0.12 |
| 1299805 | 20 | 26 | 1.42 | 0.41 | 0.10 |
| 1299941 | 21 | 26 | 1.47 | 0.42 | 0.14 |
| 1300572 | 19 | 25 | 2.00 | 0.39 | 0.33 |
| 1300578 | 19 | 24 | 1.24 | 0.40 | 0.09 |
| 1300984 | 22 | 27 | 1.60 | 0.35 | 0.20 |
| 1301108 | 18 | 24 | 1.29 | 0.35 | 0.10 |
| 1304745 | 21 | 25 | 1.35 | 0.41 | 0.10 |
| 1304758 | 20 | 25 | 1.95 | 0.39 | 0.15 |
| 1304790 | 21 | 25 | 1.92 | 0.44 | 0.30 |

### Study 4

### Treatment

[0373] Groups of four male BALB/c mice each were injected subcutaneously once a week for five weeks (for a total of six treatments) with 100 mg/kg of modified oligonucleotides. One group of four male BALB/c mice was injected with PBS. The mice were euthanized seventy-two hours post the final administration of modified oligonucleotide.

### Plasma Chemistry Markers

[0374] To evaluate the effect of modified oligonucleotides on liver and kidney function, plasma levels of alanine aminotransferase (ALT), aspartate aminotransferase (AST), blood urea nitrogen (BUN), total bilirubin (TBIL), Albumin (ALB), and Creatinine (CREA) were measured on the day the mice were sacrificed (day 39) using an automated clinical chemistry analyzer (Hitachi Olympus AU400c, Melville, NY). The results were averaged for each group of mice and are presented in the tables below. Modified oligonucleotides that caused changes in the levels of any of the liver or kidney function markers outside the expected range for modified oligonucleotides were excluded from further studies.

TABLE 49
Plasma chemistry markers in BALB/c mice

| | Plasma clinical chemistry | | | | | |
|---|---|---|---|---|---|---|
| Compound | ALT | AST | BUN | TBIL | ALB | CREA |
| No. | (U/L) | (U/L) | (mg/dL) | (mg/dL) | (g/dL) | (mg/dL) |
| PBS | 21 | 48 | 23 | 0.14 | 2.72 | 0.12 |
| 1232754 | 21 | 59 | 23 | 0.14 | 2.64 | 0.13 |
| 1232845 | 162 | 232 | 24 | 0.16 | 2.89 | 0.18 |
| 1242698 | 906 | 1673 | 19 | 0.18 | 2.94 | 0.15 |
| 1242928 | 94 | 133 | 21 | 0.13 | 2.53 | 0.13 |
| 1242929 | 132 | 149 | 27 | 0.15 | 2.66 | 0.15 |
| 1299684 | 47 | 94 | 24 | 0.11 | 2.61 | 0.12 |
| 1300266 | 5614 | 4448 | 22 | 1 | 3.3 | 0.17 |
| 1300441 | 258 | 356 | 25 | 0.14 | 2.87 | 0.13 |
| 1300539 | 1386 | 1614 | 23 | 0.18 | 2.95 | 0.13 |
| 1300897 | 55 | 100 | 19 | 0.13 | 2.57 | 0.12 |

### Hematology Assays

[0375] Blood obtained from mice at week 5 were sent to IDEXX BioResearch for measurement of blood cell counts. Counts taken include red blood cell (RBC) count, white blood cell (WBC) count, hemoglobin (HGB), hematocrit (HCT), Mean corpuscular volume (MCV), mean corpuscular hemoglobin (MCH), and mean corpuscular hemoglobin concentration (MCHC). Individual white blood cell counts, such as that of monocytes (MON), neutrophils (NEU), lymphocytes (LYM), eosinophils (EOS), basophils (BAS), reticulocytes (RETI), and platelets (PLT) were evaluated. The results are presented in the tables below. Modified oligonucleotides that caused changes in the blood cell count outside the expected range were excluded in further studies.

TABLE 50
Hematology Parameters in BALB/c mice

| Compound | WBC | RBC | HGB | HCT | MCV | MCH | MCHC |
|---|---|---|---|---|---|---|---|
| No. | (10\hat{ }3/μL) | (10\hat{ }12/L) | (g/dL) | (%) | (fL) | (pg) | (%) |
| PBS | 3.6 | 9.19 | 14 | 42 | 46 | 15 | 33 |
| 1232754 | 4.85 | 9.36 | 14 | 42 | 45 | 15 | 33 |
| 1232845 | 10.25 | 9.81 | 14 | 44 | 45 | 15 | 32 |
| 1242698 | 6.63 | 9.38 | 14 | 43 | 46 | 15 | 33 |
| 1242928 | 6.4 | 9.65 | 15 | 44 | 46 | 15 | 33 |
| 1242929 | 7.28 | 8.92 | 13 | 40 | 45 | 15 | 33 |
| 1299684 | 6.28 | 9.26 | 14 | 42 | 46 | 15 | 33 |
| 1300266 | 11.63 | 9.4 | 13 | 39 | 42 | 14 | 34 |
| 1300441 | 7.45 | 9.17 | 14 | 42 | 46 | 15 | 32 |
| 1300539 | 12.13 | 9.39 | 14 | 42 | 45 | 15 | 33 |
| 1300897 | 7.15 | 9.49 | 14 | 43 | 46 | 15 | 33 |

TABLE 51
Blood Cell Counts in BALB/c mice

| Compound | NEU | LYM | MON | EOS | BAS | RETI | PLT |
|---|---|---|---|---|---|---|---|
| No. | (10\hat{ }3/μL) | (10\hat{ }3/μL) | (10\hat{ }3/μL) | (10\hat{ }3/μL) | (10\hat{ }3/μL) | (10\hat{ }3/μL) | (10\hat{ }9/L) |
| PBS | 802 | 2656 | 118 | 25 | 0 | 347 | 1225 |
| 1232754 | 1164 | 3283 | 336 | 68 | 0 | 358 | 913 |
| 1232845 | 2712 | 6726 | 786 | 26 | 0 | 267 | 630 |
| 1242698 | 1480 | 4253 | 434 | 35 | 0 | 380 | 984 |
| 1242928 | 1763 | 4136 | 405 | 97 | 0 | 364 | 864 |
| 1242929 | 2070 | 4830 | 230 | 120 | 25 | 301 | 867 |
| 1299684 | 1836 | 3953 | 390 | 80 | 0 | 339 | 834 |
| 1300266 | 3255 | 7285 | 926 | 133 | 27 | 272 | 1650 |
| 1300441 | 2306 | 4800 | 221 | 101 | 21 | 357 | 728 |
| 1300539 | 2223 | 8584 | 1318 | 0 | 14 | 502 | 428 |
| 1300897 | 2793 | 4031 | 278 | 49 | 0 | 348 | 958 |

### Body and Organ Weights

[0376] Body weights of BALB/c mice were measured on days 1 and 39, and the average body weight for each group is presented in the table below. Liver, kidney, and spleen weights were measured on the day the mice were sacrificed (day 39), and the average organ weights for each group are presented in the tables below. Modified oligonucleotides that caused any changes in organ weights outside the expected range for modified oligonucleotides were excluded from further studies.

TABLE 52
Body and organ weights (in grams)

| Compound | Body weight (g) | | Organ weight (g) | | |
|---|---|---|---|---|---|
| No. | Day 1 | Day 39 | Liver | Kidney | Spleen |
| PBS | 23 | 26 | 1.28 | 0.45 | 0.09 |
| 1232754 | 23 | 27 | 1.41 | 0.43 | 0.11 |
| 1232845 | 24 | 27 | 1.67 | 0.47 | 0.14 |
| 1242698 | 23 | 27 | 1.65 | 0.44 | 0.11 |
| 1242928 | 24 | 29 | 1.75 | 0.42 | 0.13 |
| 1242929 | 24 | 26 | 1.48 | 0.40 | 0.13 |
| 1299684 | 25 | 28 | 1.40 | 0.41 | 0.15 |
| 1300266 | 24 | 25 | 1.96 | 0.39 | 0.12 |
| 1300441 | 25 | 27 | 1.45 | 0.41 | 0.13 |
| 1300539 | 24 | 26 | 1.85 | 0.48 | 0.30 |
| 1300897 | 24 | 28 | 1.40 | 0.44 | 0.13 |

### Example 9: Tolerability of Modified Oligonucleotides Complementary to Human NLRP3 in Sprague-Dawley Rats

[0377] Sprague-Dawley rats are a multipurpose model used for safety and efficacy evaluations. The rats were treated with modified oligonucleotides from the studies described in the Examples above and evaluated for changes in the levels of various plasma chemistry markers.

### Study 1

### Treatment

[0378] Groups of 4 Sprague-Dawley rats (Charles River) each were injected subcutaneously once a week for 6 weeks (total 7 treatments) with 50 mg/kg of modified oligonucleotide. The rats were euthanized seventy-two hours post final administration of modified oligonucleotide. Organs, urine, and plasma were harvested for further analysis.

### Plasma Chemistry Markers

[0379] To evaluate the effect of modified oligonucleotides on liver and kidney function, plasma levels of alanine aminotransferase (ALT), aspartate aminotransferase (AST), blood urea nitrogen (BUN), albumin (ALB), creatinine (CREA), and total bilirubin (TBIL) were measured on the day the rats were sacrificed (day 35) using an automated clinical chemistry analyzer (Hitachi Olympus AU400c, Melville, NY). The results were averaged for each group of rats and are presented in the tables below. Modified oligonucleotides that caused changes in the levels of any of the liver or kidney function markers outside the expected range for modified oligonucleotides were excluded from further studies.

TABLE 53
Plasma chemistry markers in Sprague-Dawley rats

| Compound | ALT | AST | BUN | ALB | CREA | TBIL |
|---|---|---|---|---|---|---|
| No. | (IU/L) | (IU/L) | (mg/dL) | (g/dL) | (mg/dL) | (mg/dL) |
| PBS | 25 | 85 | 17 | 3.06 | 0.23 | 0.11 |
| 1232844 | 63 | 212 | 35 | 2.62 | 0.36 | 0.19 |
| 1233100 | 33 | 95 | 18 | 2.93 | 0.33 | 0.1 |
| 1233104 | 22 | 68 | 19 | 2.98 | 0.31 | 0.11 |
| 1233105 | 30 | 104 | 20 | 2.61 | 0.33 | 0.13 |
| 1233279 | 23 | 91 | 17 | 2.98 | 0.31 | 0.11 |
| 1242446 | 34 | 113 | 17 | 3.03 | 0.29 | 0.1 |
| 1242447 | 33 | 58 | 16 | 3.08 | 0.26 | 0.1 |
| 1242484 | 70 | 102 | 21 | 3.35 | 0.34 | 0.14 |
| 1242538 | 24 | 59 | 16 | 3.06 | 0.28 | 0.1 |
| 1242543 | 40 | 107 | 19 | 2.98 | 0.28 | 0.11 |
| 1242546 | 26 | 80 | 20 | 2.93 | 0.29 | 0.1 |
| 1242547 | 37 | 110 | 20 | 2.94 | 0.31 | 0.15 |
| 1242579 | 27 | 95 | 16 | 3.11 | 0.27 | 0.1 |
| 1242601 | 41 | 101 | 17 | 2.93 | 0.28 | 0.14 |
| 1242633 | 38 | 78 | 16 | 3.08 | 0.26 | 0.12 |

### Kidney Function

[0380] To evaluate the effect of modified oligonucleotides on kidney function, urinary levels of total protein and creatinine were measured using an automated clinical chemistry analyzer (Hitachi Olympus AU400c, Melville, NY). The ratios of total protein to creatinine (P/C ratio) are presented in the table below. Modified oligonucleotides that caused changes in the levels of the ratio outside the expected range for modified oligonucleotides were excluded in further studies.

TABLE 54
Total protein to creatinine ratio in Sprague-Dawley rats

| Compound | P/C |
|---|---|
| No. | Ratio |
| PBS | 1.02 |
| 1232844 | 6.94 |
| 1233100 | 4.34 |
| 1233104 | 5.43 |
| 1233105 | 3.75 |
| 1233279 | 2.46 |
| 1242446 | 3.42 |
| 1242447 | 3.08 |
| 1242484 | 2.42 |
| 1242538 | 3.14 |
| 1242543 | 2.37 |
| 1242546 | 3.85 |
| 1242547 | 3.01 |
| 1242579 | 3.41 |
| 1242601 | 3.9 |
| 1242633 | 2.84 |

### Body and Organ Weights

[0381] Body weights of the rats were measured on days 1 and 35 and the average body weight for each group is presented in the table below. Liver, kidney, and spleen weights were measured on the day the rats were sacrificed (day 35), and the average organ weights for each group are presented in the tables below. Modified oligonucleotides that caused any changes in organ weights outside the expected range for modified oligonucleotides were excluded from further studies.

TABLE 55
Body and organ weights (in grams)

| Compound | Body weight (g) | | Organ weight (g) | | |
|---|---|---|---|---|---|
| No. | Day 1 | Day 35 | Liver | Kidney | Spleen |
| PBS | 186 | 424 | 14 | 3.39 | 0.77 |
| 1232844 | 183 | 294 | 11 | 3.02 | 1.61 |
| 1233100 | 178 | 351 | 13 | 3.31 | 1.33 |
| 1233104 | 187 | 348 | 14 | 3.33 | 1.73 |
| 1233105 | 181 | 324 | 17 | 2.84 | 2.19 |
| 1233279 | 185 | 361 | 12 | 3.28 | 1.54 |
| 1242446 | 189 | 385 | 13 | 2.99 | 1.22 |
| 1242447 | 183 | 396 | 13 | 3.29 | 0.82 |
| 1242484 | 194 | 407 | 13 | 3.28 | 0.87 |
| 1242538 | 186 | 365 | 13 | 3.74 | 1.53 |
| 1242543 | 184 | 391 | 13 | 3.13 | 1.06 |
| 1242546 | 182 | 374 | 13 | 3.06 | 2.09 |
| 1242547 | 184 | 341 | 10 | 2.78 | 1.54 |
| 1242579 | 183 | 358 | 13 | 2.97 | 1.02 |
| 1242601 | 184 | 360 | 13 | 3.13 | 1.32 |
| 1242633 | 180 | 385 | 12 | 3.07 | 1.08 |

### Study 2

### Treatment

[0382] Groups of 4 Sprague-Dawley rats (Charles River) each were injected subcutaneously once a week for 6 weeks (total 7 treatments) with 50 mg/kg of modified oligonucleotide. The rats were euthanized seventy-two hours post final administration of modified oligonucleotide. Organs, urine, and plasma were harvested for further analysis.

### Plasma Chemistry Markers

[0383] To evaluate the effect of modified oligonucleotides on liver and kidney function, plasma levels of alanine aminotransferase (ALT), aspartate aminotransferase (AST), blood urea nitrogen (BUN), albumin (ALB), creatinine (CREA), and total bilirubin (TBIL) were measured on the day the rats were sacrificed (day 33) using an automated clinical chemistry analyzer (Hitachi Olympus AU400c, Melville, NY). The results were averaged for each group of rats and are presented in the tables below. Modified oligonucleotides that caused changes in the levels of any of the liver or kidney function markers outside the expected range for modified oligonucleotides were excluded from further studies.

TABLE 56
Plasma chemistry markers in Sprague-Dawley rats

| Compound | ALT | AST | BUN | ALB | CREA | TBIL |
|---|---|---|---|---|---|---|
| No. | (IU/L) | (IU/L) | (mg/dL) | (g/dL) | (mg/dL) | (mg/dL) |
| PBS | 27 | 88 | 16 | 3.11 | 0.28 | 0.09 |
| 1299773 | 28 | 98 | 21 | 2.78 | 0.38 | 0.13 |
| 1300578 | 94 | 162 | 21 | 3.04 | 0.41 | 0.22 |
| 1304745 | 36 | 100 | 14 | 3.03 | 0.33 | 0.1 |

### Kidney Function

[0384] To evaluate the effect of modified oligonucleotides on kidney function, urinary levels of total protein and creatinine were measured using an automated clinical chemistry analyzer (Hitachi Olympus AU400c, Melville, NY). The ratios of total protein to creatinine (P/C ratio) are presented in the table below. Modified oligonucleotides that caused changes in the levels of the ratio outside the expected range for modified oligonucleotides were excluded in further studies.

TABLE 57
Total protein to creatinine ratio in Sprague-Dawley rats

| Compound | P/C |
|---|---|
| No. | Ratio |
| PBS | 1.17 |
| 1299773 | 5.82 |
| 1300578 | 2.87 |
| 1304745 | 3.69 |

### Body and Organ Weights

[0385] Body weights of the rats were measured on days 1 and 33 and the average body weight for each group is presented in the table below. Liver, kidney, and spleen weights were measured on the day the rats were sacrificed (day 33), and the average organ weights for each group are presented in the tables below. Modified oligonucleotides that caused any changes in organ weights outside the expected range for modified oligonucleotides were excluded from further studies.

TABLE 58
Body and organ weights (in grams)

| Compound | Body weight (g) | | Organ weight (g) | | |
|---|---|---|---|---|---|
| No. | Day 1 | Day 33 | Liver | Kidney | Spleen |
| PBS | 251 | 447 | 12 | 3.46 | 0.85 |
| 1299773 | 250 | 353 | 12 | 3.75 | 2.78 |
| 1300578 | 255 | 417 | 14 | 3.98 | 1.87 |
| 1304745 | 238 | 390 | 11 | 3.14 | 0.82 |

### Study 3

### Treatment

[0386] Groups of 4 Sprague-Dawley rats (Charles River) each were injected subcutaneously once a week for 5 weeks (total 7 treatments) with 100 mg/kg of modified oligonucleotide. The rats were euthanized seventy-two hours post final administration of modified oligonucleotide. Organs, urine and plasma were harvested for further analysis.

### Plasma Chemistry Markers

[0387] To evaluate the effect of modified oligonucleotides on liver and kidney function, plasma levels of alanine aminotransferase (ALT), aspartate aminotransferase (AST), blood urea nitrogen (BUN), albumin (ALB), creatinine (CREA), and total bilirubin (TBIL) were measured on the day the rats were sacrificed (day 33) using an automated clinical chemistry analyzer (Hitachi Olympus AU400c, Melville, NY). The results were averaged for each group of rats and are presented in the tables below. Modified oligonucleotides that caused changes in the levels of any of the liver or kidney function markers outside the expected range for modified oligonucleotides were excluded from further studies.

TABLE 59
Plasma chemistry markers in Sprague-Dawley rats

| Compound | ALT | AST | BUN | ALB | CREA | TBIL |
|---|---|---|---|---|---|---|
| No. | (IU/L) | (IU/L) | (mg/dL) | (g/dL) | (mg/dL) | (mg/dL) |
| PBS | 25 | 93 | 0.22 | 3.19 | 16 | 0.12 |
| 1232754 | 25 | 81 | 0.32 | 3.11 | 20 | 0.09 |
| 1232845 | 100 | 176 | 0.49 | 2.09 | 33 | 0.28 |
| 1242928 | 206 | 468 | 0.33 | 2.98 | 19 | 0.22 |
| 1242929 | 45 | 140 | 0.33 | 2.83 | 17 | 0.11 |
| 1299684 | 24 | 79 | 0.34 | 2.86 | 20 | 0.1 |
| 1300441 | 54 | 139 | 0.34 | 3.24 | 19 | 0.12 |
| 1300897 | 42 | 99 | 0.38 | 3.05 | 23 | 0.09 |

### Kidney Function

[0388] To evaluate the effect of modified oligonucleotides on kidney function, urinary levels of total protein and creatinine were measured using an automated clinical chemistry analyzer (Hitachi Olympus AU400c, Melville, NY). The ratios of total protein to creatinine (P/C ratio) are presented in the table below. Modified oligonucleotides that caused changes in the levels of the ratio outside the expected range for modified oligonucleotides were excluded in further studies.

TABLE 60
Total protein to creatinine ratio in Sprague-Dawley rats

| Compound | P/C |
|---|---|
| No. | Ratio |
| PBS | 1.28 |
| 1232754 | 3.3 |
| 1232845 | 8.95 |
| 1242928 | 2.95 |
| 1242929 | 2.14 |
| 1299684 | 4.14 |
| 1300441 | 2.9 |
| 1300897 | 3.64 |

### Body and Organ Weights

[0389] Body weights of the rats were measured on days 1 and 33 and the average body weight for each group is presented in the table below. Liver, kidney, and spleen weights were measured on the day the rats were sacrificed (day 33), and the average organ weights for each group are presented in the tables below. Modified oligonucleotides that caused any changes in organ weights outside the expected range for modified oligonucleotides were excluded from further studies.

TABLE 61
Body and organ weights (in grams)

| Compound | Body weight (g) | | Organ weight (g) | | |
|---|---|---|---|---|---|
| No. | Day 1 | Day 33 | Liver | Kidney | Spleen |
| PBS | 243 | 434 | 12 | 3.41 | 0.85 |
| 1232754 | 255 | 407 | 13 | 3.33 | 1.1 |
| 1232845 | 242 | 352 | 16 | 4.93 | 3.07 |
| 1242928 | 253 | 361 | 12 | 2.97 | 1.45 |
| 1242929 | 253 | 407 | 13 | 3.75 | 1.9 |
| 1299684 | 250 | 387 | 13 | 3.48 | 2.28 |
| 1300441 | 237 | 354 | 10 | 2.94 | 1.56 |
| 1300897 | 236 | 354 | 10 | 2.79 | 1.38 |

### Example 10: Activity of Modified Oligonucleotides Complementary to Human NLRP3 in Transgenic Mice, Single Dose

[0390] A transgenic mouse model was developed using the Fosmid ABC11-49324000P12. The clone was digested at NaeI restriction site to produce a region containing the 33164 base pairs of human NLRP3 gene together with non-genic regions of the fosmid. The gene fragment was introduced into fertilized eggs from C57BL/6NTac strain mice (Taconic Biosciences) by pronuclear injection to produce 4 founder lines. Males from Line 1 were used in the experiments described herein. Human NLRP3 RNA expression is found in the liver, kidney, and heart, in this model.

### Treatment

[0391] Transgenic mice were divided into groups of 2 mice each. Each mouse received subcutaneous injections of modified oligonucleotide at a dose of 100 mg/kg once a week for either one or two weeks (2 treatments), as indicated in the tables below. One group of 2-4 mice received subcutaneous injections of PBS or saline twice a week for either one or two weeks (2 treatments), as indicated in the tables below. The PBS or saline-injected group served as the control group to which modified oligonucleotide-treated groups were compared.

### RNA Analysis

[0392] 72 hours post the final treatment, mice were sacrificed, and RNA was extracted from mouse liver, heart, and/or kidney as indicated for quantitative real-time RTPCR analysis of NLRP3 RNA expression using human NLRP3 primer probe set RTS37509 (described herein below). NLRP3 RNA levels were normalized to total RNA content, as measured by RIBOGREEN®. Results are presented as percent NLRP3 RNA, relative to the amount in tissue from PBS or Saline treated mice (% control).

TABLE 62
Reduction of human NLRP3 in transgenic mice (two-week study)

| Compound | NLRP3 RNA (% control) | | |
|---|---|---|---|
| No. | Liver | Heart | Kidney |
| PBS | 100 | 100 | 100 |
| 1242543 | 66 | 68 | 183 |
| 1232764 | 36 | 31 | 85 |
| 1232844 | 49 | 114 | 97 |
| 1233100 | 49 | 39 | 55 |
| 1233104 | 38 | 38 | 40 |
| 1233105 | 90 | 14 | 53 |
| 1233144 | 52 | 57 | 28 |
| 1233175 | 53 | 32 | 75 |
| 1233279 | 82 | 39 | 95 |
| 1241668 | 74 | 23 | 47 |
| 1241669 | 734 | 58 | 67 |
| 1242447 | 417 | 77 | 109 |

TABLE 63
Reduction of human NLRP3 in transgenic mice (two-week study)

| | Liver |
|---|---|
| Compound | NLRP3 RNA |
| No. | (% control) |
| PBS | 100 |
| 1299773 | 27 |
| 1299805 | 30 |
| 1299941 | 33 |
| 1300422 | 215 |
| 1300572 | 56 |
| 1300578 | 39 |
| 1300636 | 112 |
| 1300655 | 84 |
| 1300668 | 131 |
| 1300984 | 32 |
| 1301108 | 46 |
| 1304745 | 36 |
| 1304758 | 25 |
| 1304790 | 83 |

TABLE 64
Reduction of human NLRP3 in transgenic mice (one-week study)

| Compound | NLRP3 RNA (% control) | | |
|---|---|---|---|
| No. | Liver | Heart | Kidney |
| Saline | 100 | 100 | 100 |
| 1242747 | 37 | 61 | 62 |
| 1242819 | 35 | 23 | 56 |
| 1242907 | 49 | 50 | 71 |
| 1242916 | 41 | 110 | 61 |

### Example 11: Activity of Modified Oligonucleotides Complementary to Human NLRP3 in Transgenic Mice, Multiple Dose

[0393] hNLRP3 transgenic mice (described herein above) were used to determine dose response activity of modified oligonucleotides complementary to human NLRP3.

### Treatment

[0394] Transgenic mice were divided into groups of 4 mice each. Each mouse received subcutaneous injections of modified oligonucleotide at a dose indicated in the tables below twice a week for one week (2 treatments). One group of 3-4 mice received subcutaneous injections of PBS twice a week for one week (2 treatments). The PBS-injected group served as the control group to which oligonucleotide-treated groups were compared.

### RNA Analysis

[0395] 72 hours post the final treatment, mice were sacrificed, and RNA was extracted from mouse liver, heart, and kidney for quantitative real-time RTPCR analysis of human NLRP3 RNA expression. Human NLRP3 primer probe set RTS37509 (described herein above) was used to measure human NLRP3 RNA levels. NLRP3 RNA levels were normalized to mouse GAPDH. Mouse GAPDH was amplified using mouse primer probe set mGapdh_LTS00102 (forward sequence GGCAAATTCAACGGCACAGT, designated herein as SEQ ID NO: 13; reverse sequence GGGTCTCGCTCCTGGAAGAT, designated herein as SEQ ID NO: 14; probe sequence AAGGCCGAGAATGGGAAGCTTGTCATC, designated herein as SEQ ID NO: 15). Results are presented as percent NLRP3 RNA, relative to the amount in PBS treated animals (% control). ED50s were calculated in Prism using nonlinear fit with variable slope (four parameter), top constrained to 100% (or 1), bottom constrained to 0. Y=Bottom+(Top−Bottom)/(1+(IC50/X)\hat{ }HillSlope).

TABLE 65
Reduction of human NLRP3 in transgenic mice

| | | Liver | | Kidney | | Heart | |
|---|---|---|---|---|---|---|---|
| | | NLRP3 | | NLRP3 | | NLRP3 | |
| Compound | Dose | RNA | ED50 | RNA | ED50 | RNA | ED50 |
| No. | (mg/kg) | (% control) | (mg/kg) | (% control) | (mg/kg) | (% control) | (mg/kg) |
| PBS | 0 | 100 | — | 100 | 1 | 100 | — |
| 1242484 | 90 | 43 | 44 | 50 | 74 | 40 | 32 |
| | 30 | 60 | | 67 | | 47 | |
| | 10 | 65 | | 87 | | 68 | |
| 1242579 | 90 | 40 | 42 | 55 | 76 | 50 | 72 |
| | 30 | 51 | | 64 | | 64 | |
| | 10 | 81 | | 80 | | 90 | |
| 1299773 | 90 | 29 | 23 | 39 | 39 | 23 | 12 |
| | 30 | 39 | | 53 | | 36 | |
| | 10 | 69 | | 73 | | 45 | |
| 1304745 | 90 | 24 | 29 | 48 | 53 | 39 | 55 |
| | 30 | 57 | | 59 | | 60 | |
| | 10 | 63 | | 74 | | 91 | |

TABLE 66
Reduction of human NLRP3 in transgenic mice

| | | Liver | | Kidney | | Heart | |
|---|---|---|---|---|---|---|---|
| | | NLRP3 | | NLRP3 | | NLRP3 | |
| Compound | Dose | RNA | ED50 | RNA | ED50 | RNA | ED50 |
| No. | (mg/kg) | (% control) | (mg/kg) | (% control) | (mg/kg) | (% control) | (mg/kg) |
| PBS | 0 | 100 | — | 100 | — | 100 | — |
| 1233100 | 90 | 24 | 16 | 43 | 44 | 21 | 15 |
| | 30 | 40 | | 58 | | 38 | |
| | 10 | 50 | | 71 | | 53 | |
| | 3 | 88 | | 90 | | 89 | |
| | 1 | 91 | | 97 | | 78 | |
| 1233279 | 90 | 36 | 21 | 50 | 60 | 23 | 11 |
| | 30 | 55 | | 68 | | 38 | |
| | 10 | 54 | | 75 | | 55 | |
| | 3 | 66 | | 86‡ | | 79‡ | |
| | 1 | 86 | | 97 | | 80 | |
| 1242447 | 90 | 24 | 16 | 51 | 68 | 33 | 20 |
| | 30 | 34 | | 70 | | 56 | |
| | 10 | 59 | | 86 | | 59 | |
| | 3 | 73 | | 63‡ | | 81‡ | |
| | 1 | 120 | | 98 | | 93 | |
| 1242543 | 90 | 34 | 10 | 54 | 97 | 33 | 5 |
| | 30 | 30 | | 90‡ | | 25‡ | |
| | 10 | 45 | | 99 | | 43 | |
| | 3 | 67 | | 107 | | 56 | |
| | 1 | 123 | | 117 | | 70 | |
| 1242547 | 90 | 40 | 7 | 46 | 53 | 60 | 4 |
| | 30 | 34 | | 58 | | 33‡ | |
| | 10 | 31 | | 81 | | 31 | |
| | 3 | 61 | | 89 | | 37 | |
| | 1 | 91 | | 97 | | 82 | |
| 1242601 | 90 | 25 | 14 | 68 | 223 | 28 | 5 |
| | 30 | 42 | | 89 | | 33 | |
| | 10 | 59 | | 102 | | 38 | |
| | 3 | 70 | | 132 | | 62 | |
| | 1 | 68 | | 89 | | 52 | |

‡indicates that fewer than 4 samples were available

The application's sequence listing, which the Patent Office published only in electronic form, follows.

SEQUENCE LISTING (2799 sequences)

SEQ ID NO: 1 - DNA, 39000 bp, Homo sapiens
gattgtattgtgtatatatgccccaaactctttatttattcatctgtcaatagacacttgggttgtttgcctatctggaccatggtgaataatgctgctatgaacatgagtgcacagatgtctttgtgaggtggtgattttatttcctttggatacacactcagaagaaggattgctgggtcatacggtagttctatttttaatttctttaggaacctccatattgttttctgcaatggctgcaccaatctgcattcccagcagcaatgtgcaagggttccctgttcttcacgccctagccaatgtttgtctcttgtcattttgctaatagccatcctaacaggtttgaggtggtacctcattgtgggtttggtttgcatttccctgatgattagtgatgttgagcacttttttgtatacatgttgaccatttttgtttcttttttagagaaatgtctattcagttcctttcttcattttaaaaatcagattatttgttttatgctttgagttgtgtgaattccttacatattttgcatattaactacttatctgatatatggcttaaaactattttcttccaatttgttggctaccttttcactctgttgattgtttcttttgctatacaggagctttttactttgatgtattcccacttatttatctttacttttgttcctttgcttttgttgagacattaaaaatatccatgccaaggctaatatcaagaagttttctcctctgttttctattttttatatttagttttttatctgtttagagattgggtctcattctgttacccaggctggaatgcagtagtgtcattatagctcactgtaacctcaaattcctgggctcaagtgatcttcttgcctcggcctcctgagtagctgggctacaggtgcacagcaccatgcctggctaatttttttttttttaattttgtagacacaaagtctcactatgttgcccaggctgactgtgaacttctggcctcaggtgatcctcctgcctcagcctcccagagtgctgggattacaggcatgagccaccatgcctggcttcttctctattttcttctaggagttttacagttttagatcttatgtttagatctttaatccattttgagttggtttttgtgtgtgccaagttttattcttttgcgtgtggaaatccagtttcaccaaaagcttaatttttcaaaatcttatatttttcttgatttttttttcacacttctatagccaacatctttattgaagagattgtcctttctccattgtgtcttcttggtgaccttgtcaaagaattagttgactgcatatacttgagtttatttctgttccactggtctatgggtctgtttttataaaggcatggatttttactgcatatgaattatacctaaatttgtcttttttttttcctttttctggagaatggggtctcactatattgcccaggcaggtctcgaactcctgggctcaagctatcctcccgcctcttgcctccctgagagctgggattacaggcgtgagccactgcgcccggctgaattatacctaaattaacttgactaaacaaacaaaaacaaaaagatcccaggttcagccaatgagctcctttttttttttttgaaatggagtcttgctcttgtcacccaggctggagtgcagtggcacaatctcagctcactgcagcctccacctcccaggttcaagtgattctcttgcctcagcttcctgagtagctgggattacaggtgcccgccaccacacccagctatttttttttatatttttagtagagatggggtttcgtcatgttggccaggctggtctcaaactcctgaccttgtgatctgcctgccttggcctctcaaagtgctgggattacaggcatgagccactgcacccaggctgagctcctttcttttggagcatatttggtctgctttctctctagcttcagcacctgaagtttttgctgctcctgcctcagctccagccccgaatgacacctttcacctggttcatggagactcaggtctgctgtcatgcccctaagcaggactagatgcctctctcatgttgtagagcattctctctgcagttctgtagaaaggtggtagtcatcggaaccaactgcttattctagcttctctgtgccaggctctgttttaaaggcctcacgtttagccattcactcagtgttttctgacagccttctaggataggtaccgttatttgggttgatgtagtgcttggtcaaatgcagtataatgaagggatcaaggagggggcaattccaagcaaaaccacttgttcatccatcctgagtctaggagatttggaagatctaaagaagtagcaggcaattattgtcacccttttacaggtatgaggcacagacagacccagtcatttgctgacatccctccactgaactgggtgctcgtccttttcactcacccagaggctgagcgagtgcctctcacccaccaagctctgttgaacttgtgcctttgccggtctgtggtcctgcggccgtctcatgagctgcagagtaggtctgtgtgtgtctctcctcaagctactcaagctgaggctttgtgtgcatgcctgccacataccagccattccgtgagtgttagtggaacaggtgagtcaatgagtcagggagtaaaatttgtgctttaaaagtagaacatgtcggagagaacctgtactgccttccagccatcttgctgtgagaggacagggcatggactctggagtttgaaggctgggtcaggtcatgctctggattctttactcactcgcatggcatgtccttagtttcacttccctcactctcagtggagccgttgcagcgggcagtgtcagaggcaacatccatttagcactgccgatttgacccccagccccatctcatactggcctcccaccctgcttctgtggggtgcctcagaggagagcaaggtgaaccccagtatggaaccgagacacggttttgacaacactgttgatcccatttggaaaatccagctatgtgattaaccattagtctctctgcctctgctctgatgtaagtggagaccacatccttcctgccccttctggggctgcgactgctataaattcattgcatttcctctctagctgttcctgaggctggcatctgggtaagtccagctccgcggggcagtgtgggcgacaggaccgggagagcagtgggggagattgtgttcagagggcagaacttgtcctggttaatgcactaggaatttcttctggcgtctccaaggttgtgcttcaacaacatttctggaatgttcttttatcattatttgggctctacgtgtgcaagttcgtgtgtgtgtatgtggcggggggaagcggggaggacagcggcagcaaccatagtttacacccacgacttcagcagatttgcccagtatccctcccaggggagaagatggatgggatatacagaaggaaacaaacctccttaaagaccaaagggcagcagatttttgtgctggtgttagggtggaaggagcacagaagaaaggcagaatcctgatgcagatggaaggactgatggggcaggagctgggagggtatgcggagctaatagggctgtctggagagcagtcacctcaggatgggcaggagctgggagggtatgcggagctaatagggctgtctggagagcagtcacctcaggatgcacagggctgggtttgcagggctcaggaggcgaggagtagataggcaggaatggagatgggacgggagagatgagtgagtctgaggcatcttgacattgaactgcagtcacagaaattccaatttggagagctccaccgttttccaggctctctgcctcccttgagtgttatttatggctttaggttgaggtgctttgccaaatagagtataatcaagggatcaaggagggaacaattccaaacaaagccaacttgttcatccatccggactctaggagatatggaagatctaaagatacagcaggtgattgctagtttttgtggaactcacagtctagttgggaagactatgttggtgaatgctgcagtgatacacctgtgataaatgctggggaagtgtgtcttttagtcatctattttgttgtctttgtctttgtctgactgaaacaagtgatggaagacatggtctcatatctctggtcaaaatcctggctctgttccttcctggttctaaacccctcggcaggcttcctagtccccctaagactcagtttatgcatctataaaatggggctaggaataggtgcacctcatagagctctgtgcaggttagatggggaaaaacatcagtgagtgcctagcctgtggaaagctctaaattaatgtgaattataatgataacaattgcgaattttgcaaggagacattaaaggatgtatgtttttatttattttattttattctattttattttttgagatggagttttgctcttattgcccaggctggagtgcagtggtgtgatcttggctcatcgcaacctccgcctcctgggttcaagcgattctcctgcctcagcctcccgagtagctgggattacaggtgcctggtaccatgcccggttaatttttgtatttttagtagagacgggatttctccctgttgtttggtgagcctggtctccaactcctgacctcaggtgatccgcccacctcggcctcccaaagtgctgggattacagggatgtatgtttttattattctccattatgcactcccagcttcatctcacttcaatccactggttgatagaagtgcagtcaaagactgtcccctcctctgcaagcttttatgttctctctcctctctccctagccacgtcctgttctgttatcaacacacttactcacctcctggccttctccttctattgtctctcatccctcttccctcacaaaaacagaagcaaagagccagagccttcagtttggaggaactgaaaacattctcttctgctttctcattttgtagatgaggaaactgaagttgaggaatagtgaagagtttgtccaatgtcatagccccgtaatcaacgggacaaaaattttcttgctgatgggtcaagatggcatcgtgaagtggttgttcaccgtaaactgtaatacaatcctgtttatggatttgtttgcatatttttccctccatagggaaacctttcttccatggctcaggacacactcctggatcgagccaacaggagaactttctggtaagcatttggctaacttttttttttttgagatggagtcttgctgtgtcgcctaggctggagtgcagtggcgtgatcttggctcactgcagcctccacttcccgggttcaatcaattctcctacctcaacttcctgagtagctgggattacaggcgcccgccaccacacccggctcatttttgtacttttagtagagacacagttttgccatgttggccaggctggtcttgaattcctcagctcaggtgatctgcctgccttggcctctcaaagtgctgggattacaggcgtgagccactgtgcccggccttggctaacttttcaaaattaaagattttgacttgttacagtcatgtgacatttttttctttctgtttgctgagtttttgataatttatatctctcaaagtggagactttaaaaaagactcatccgtgtgccgtgttcactgcctggtatcttagtgtggaccgaagcctaaggaccctgaaaacagctgcagatgaagatggcaagcacccgctgcaagctggccaggtacctggaggacctggaggatgtggacttgaagaaatttaagatgcacttagaggactatcctccccagaagggctgcatccccctcccgaggggtcagacagagaaggcagaccatgtggatctagccacgctaatgatcgacttcaatggggaggagaaggcgtgggccatggccgtgtggatcttcgctgcgatcaacaggagagacctttatgagaaagcaaaaagagatgagccgaagtggggtgagtggaaggaagacttttaaaaaaaattgtggccaagtgcacatagtgtacaattttccatctttatatatatatatatatatatttttttttgagacggagttgctcttgttgcccaggctggagtgcaatggtgagatcttggctcactgcaacctccacctcccgggttcaagcgattttcctgcctcagcctcccaagtagctgggattacaggcattgcacctccacgcccggctaattttgtatttttagtagagatggggtttctccatgttggtcaggttggtctcaaactcccgacctcaggtgatccacccgcctcggcctcgcaaagtgctggaattacaggtgtgagccaccgcgcccggccgtaataatttttaaatgtacagttcagtagtgttaggtacactcacattgtgcaaccagtctccagaactgttttcatcttgcaaaactgaaactcctcacccattgaatgataactcctcattgcctcattctcccagccctggtaaccaccattctatttgccatctctgtgaatcttactactctgggtacctcatataagtggaaacatacagcattttttcctttatgagtagtttatttcactcagcataatgtcctccgggttcaactatgttgtagcatgtgtcggaattcccttcctttaaaaaagactgtataaatactccatggtaccatataccaaattttgtttagttatctgttgatgaacacctggattacttctacctttttgttattgttaatgctgttatgagtgttggtgcacaaatatctcttcaagaccctgctttgaattctctggggtatatactcagaagtgaaatttctgaatcatacggtaattctgttaaatattttgaagaactgctctactgttttagataccatctgcaccatttcccaccaacagcacacaagggttccaatttctccatatcctaagaacacgttatttttatttattttttcttttttatagtagccattctaatgagtgtgaggtggtatctcactgtagttttgatttccgtttccctaatgataagtgatgctgagcacattttcactgcttgttggccatttatagagcttcttcagagaaagttctgttcaagttcttttctcattttcagaccaggtttggcttttgttgttgccttgtaggagttctttatgtattctagatattaaccccatatcagatatatgatttacaaatattttctcctattctgtgggttgtcttttcatttggttaactgtgtcctttgatgcacagaagttagtatgatttttttttttttaaatcatggccgggcatggtggctcatgcctgtaattccagcactttgtgaggctgaggtgggtggatcacctgaggtcaggagttcaacaccagcctggccaacatggcaaaaccccatctctactaaaaatacaaaaaaaattagccgggtgtggtggtgggcacctgtaatcccagctactcaggaggctgaggtaggagaattgcttgaacatggggagtggaggttgcagtgagctgagattgcaccacggcactccagcctgggctaaagagcaagaccctgtttcaaaaaaaaatttttttttcttgtattgtcttggttttttctcttttcccctctcacggtagtgctatgagaaggtggaggcaaactgtttgctttctctaactcctttaaaaagctgatgcagactgtacctaccccctgggcacctgccatgattagtccctctttatctgaatctcagcagtgcctagacctgcctccaattctccatccagcttctcagaccacatgttttgtccagtatctgctgtgtggtcagcaggcttgggcctctgcttcctatggcccagagggcagcctctctccttgaagaaccgtggagtttggggcagaagcctttcctttcaccaccactttgggaattggaatgtaaaagaaattctcttaatccccatgtacacattggggataaggttctttcttttgtcttgtgttctaggcaaaggtagggctcagagaagggcagggtattgcaggatgatgatgtagagctggtggtgatgggaaggaggagtacaaatgagtcagtggatagggagacacatgttaaggcagggcagcagtgtgggtgtaatgacactggggaaacagacagcagtgtgcagccgggggaggtcagaaaccagttgctgcaatggctctcacctgtagtcccagctactcaggaggctaaggcaggaggatcgcttgagcccaggagctcaaaaccagcctgagcaacatagggagacctcatctctaagtaaataaagcaattatcattgtgtcagtacttatatactcacatacccaaatgaaagtgtcataatcacaactgtagaagtactttgctaagcagtttttatggattttatggcacattcaagaaacccatgaaacagcttctggtattatccctcctgcaagtgaatgaggtgagcctggaagagatcctaactggcccatggtttatttctagccataaccagagctggggtaaaaagcagggcatgtctctgatcaaagcctggctcttaaccactacaccgtctttgcttccatatctggattttgaggcagaaaagttataactagggttagaagtttgtttgtttgtttcctggggtggggttaggttttaggtaatagactttggctaatttactgtcatggctcctacctgagtcccagttactcaggtggctgaagtgggtgcatcacttgagctcaggagttccaggctggagtgagctatgaccatgccactgccctccagctttggaaacaaagcaagactctgtctcttaaaaaaaaagaataagattttggttttggcttagattttttggattttattttgtgatatggttaccaagtagacagctgtcagaggtcttttatgggctgggcgcagtggcttatgcctgtaatcccagcacttcaggaggccaagatgggaggattgcttgagcccaggagtttgagaccagcctgggcaacatagtgagaacctgtctctacaaaaaatgcaaacattagttaggtgtggtggcacgtgtcaatagtcccagctgttctggaggctgaggtgggaggatcacttgagcccaggaggttgaggctgcagggagccatgattgtgtcattgcactccagcctgggcaatagagtgaggccctgtctcaaaaaaaaaaaaaaaatcatttatgttacttgtagattcctgcccacctgaagttatctgtcttatatatttcccctagtgactaactcttgttttacctaacctgaatttctcctatagaatgccttcttaagatatgctatctagtgactgtttggatttgtgattctcaacacagatgcatgttggaatcacctgggagcttttagtatgtgatggttcctgggcctcacctcagagggactgaaaaagaacctctgggcgtgcagtcctgaagtccatatttttaaagcttcctgggtgattctaaagtcagccaggattcccaaccactagattaggcacgaaatagactggtcgttctcactcttgaagaaccagacatctagacttgacaatagaagacgtgtgtaaaatggattgcagggaactgcggtcagggaagggtgacctttcttagcccacagccgtgttggggatataggagagcttggagatgccctcacaatcaggctgccaggggcaggcaaaagcaaacgagggtaaaagaaacttagcctgcttcgcatgtttgctgattgatttccaggcctgaggaagagattctgagactggggacagtgggaacacatgcttggcaggtggacagcagaagttgttttgaaactaggagtgcagaaatgctcccaaccagacttttgactggatacctgtcctctgcaactcagagccatgttttgatttgggggatgtttggggtctcctctctcatgccaaatattaggccaggtttcaattgcatcctctgtgataatagttctgggttttgacaccttttttttcccttttaggttcagataatgcacgtgtttcgaatcccactgtgatatgccaggaagacagcattgaagaggagtggatgggtttactggagtacctttcgagaatctctatttgtaaaatgaagaaaggtaagcgactggggtggtgcttctagttgagttttaagacctggttcaggaggctctgggaagctgagcagctgggtaacttggccatactataggttcctgctctttggaatgcaaaggcctgtctcaggaaatccattgtcagttgaagaaacaaattcatgtttgtgtggctcttgcagtcccagagccagcggcggtgattaagcgtttcaagtttgataaggcataggatgcagattacttaaaggaataagattgattcaaatgatctttgggctggtagctacacatagagatgggccttctgctcagctgtgtatcttaaaaacttgacaccagagattctcggcacctttcctacccagtggggaggagctgcaccttccatttctccattccggttaccactcgcttccgatgacaggccccagctgagagcgcatctcaggtggatgtgtgtatactttccccctaacttcctgtctttgccgtagattaccgtaagaagtacagaaagtacgtgagaagcagattccagtgcattgaagacaggaatgcccgtctgggtgagagtgtgagcctcaacaaacgctacacacgactgcgtctcatcaaggagcaccggagccagcaggagagggagcaggagcttctggccatcggcaagaccaagacgtgtgagagccccgtgagtcccattaagatggagttgctgtttgaccccgatgatgagcattctgagcctgtgcacaccgtggtgttccagggggcggcagggattgggaaaacaatcctggccaggaagatgatgttggactgggcgtcggggacactctaccaagacaggtttgactatctgttctatatccactgtcgagaggtgagccttgtgacacagaggagcctgggggacctgatcatgagctgctgccccgacccaaacccacccatccacaagatcgtgagaaaaccctccagaatcctcttcctcatggacggcttcgatgagctgcaaggtgcctttgacgagcacataggaccgctctgcactgactggcagaaggccgagcggggagacattctcctgagcagcctcatcagaaagaagctgcttcccgaggcctctctgctcatcaccacgagacctgtggccctggagaaactgcagcacttgctggaccatcctcggcatgtggagatcctgggtttctccgaggccaaaaggaaagagtacttcttcaagtacttctctgatgaggcccaagccagggcagccttcagtctgattcaggagaacgaggtcctcttcaccatgtgcttcatccccctggtctgctggatcgtgtgcactggactgaaacagcagatggagagtggcaagagccttgcccagacatccaagaccaccaccgcggtgtacgtcttcttcctttccagtttgctgcagccccggggagggagccaggagcacggcctctgcgcccacctctgggggctctgctctttggctgcagatggaatctggaaccagaaaatcctgtttgaggagtccgacctcaggaatcatggactgcagaaggcggatgtgtctgctttcctgaggatgaacctgttccaaaaggaagtggactgcgagaagttctacagcttcatccacatgactttccaggagttctttgccgccatgtactacctgctggaagaggaaaaggaaggaaggacgaacgttccagggagtcgtttgaagcttcccagccgagacgtgacagtccttctggaaaactatggcaaattcgaaaaggggtatttgatttttgttgtacgtttcctctttggcctggtaaaccaggagaggacctcctacttggagaagaaattaagttgcaagatctctcagcaaatcaggctggagctgctgaaatggattgaagtgaaagccaaagctaaaaagctgcagatccagcccagccagctggaattgttctactgtttgtacgagatgcaggaggaggacttcgtgcaaagggccatggactatttccccaagattgagatcaatctctccaccagaatggaccacatggtttcttccttttgcattgagaactgtcatcgggtggagtcactgtccctggggtttctccataacatgcccaaggaggaagaggaggaggaaaaggaaggccgacaccttgatatggtgcagtgtgtcctcccaagctcctctcatgctgcctgttctcatgggtaaggaaactcggcttccaggtgcttcctcctgcttcctcgccagcttcttcttggcgcttgcctcctctcatctcttttcaactatcttccaaatactgttgccacagctacatcataatgccaccactgtctgtttgagactccttcatgagcaaagattgatgtatggtaggtggataaatgggatgaggaaaaaaaaaataaaacaaggaacaaatgtttggggaatgccagtttagcacaaggtattaagtaggatgtaggattgcctacaaatatttgtcaactgaaatttcttgtaagctacttggagcactagtgcctaagagtcagtcaatgtctgtggggcagaacaatgccagagagtctgtgtcccaggagcgaggggacagagggcctcagagctggaggctggggggatgtttcttagaaatgtgcaatctaagcctcctttaaggaatggtgggacctgggcgcatagagaagaaattaaaggaattctgcactgaagactggtatgagccaaatcatgaatgcagtctgagaaaaagtgtgtgcaggtgacagtggagagagacacagtttccttggaaaaaaacatgatgaaggtaaatcaagggaaatagagcagaaatgtggagaccctctttctaggcccccatgttgctctgcactgggcattgccaaaaccccgttttcgggtctgttcacacacttgctgggtggttggaagctagtggccaagtctgtgcaatgaagtggttgagtcacctgacttctgagtcccttttgggtttatcgttcagtgcctcctgcagaaggaccacccacagtggttgtaggaaggtggccaccctgtgatgtgtgagtttagcctggatagaagacacttgacgtggggcaaaattaagggaaacaggaggcttggcccttccacaggcaacaatgagtttcagctttcttgatccgttgacattaccatgaccaggaccaccttcctagtcatggtttggccatgaaggactgactgcccacagggccgcagtggtggtgaagacccaggtcctggtcacagggacttgaggtctggctgtgggacagtccggaaacaagtgcagatgtcggggagggggtcatgggctctgacaaggaaacttgcagagtatccaaagcacaaggggacgaacctgttcaccagcggggcacgggtgggtgtccccgctcagccagcttccggaggatgggcagtgagagagtgagagaaggaaaggggcagccaggctgggggcttacggtgttgagagagagggcaggtgtgggaaagcagggtacggtttctacggcagcaaacagttccgagtgactggaaaaaagacagttgtcttcattcatcaggttgccataacaaaacactgcaggctggttggcttataagcaaaaggaaggttcaccttacggttctggaggctgggaagtccatgatccaggctctggcagatctggtgtttggtgagggcctgttccctggtcgatggtgccttctcactgtgtccttacatggtgaagaggcaaggcagctctctggggtccctttcctaaggacagcaatcccactcctgagggctccaccctcataacttaaccacacctcaaaggccccatcgcctgatacgtcatgttgagggttaggatttcagcgtatggattttggggcacacaaacattcagaccatagaaatgggagaagaagagtaagacagagagaaaagtaggcagaactactcattaagagtgaggtggaaggtggagagggcagggagaccttatgaagatcacacatctgtgaggaaggtttgcacactctcactgaagccccggtaggaggctcagcacccatttctctagatagcaccttccttcctctgaggacagattctgactggagccctggtagggggctcagcacccatccctctagatggcacctgccttactctgaggacagactctcactgaagccccggtaggaggctcagcacccatttctctagatagcaccttccttcctctgaggacagactctgattggagccctggcagggggctcagcacccatttctctagatagcaccttccttcctctgaggacagactctcactgaagccccggtaggaggctcagcacccatttctctagatagcaccttccttcctctgaggacagactctgattggagccctggcagggggctcagcacccatccctctagatggcacctgccttactctgaggacagactctcactgaagccccggtaggaggctcagcaaccatttctctagatagcaccttccttcctctgaggacagactctgattggagccctggcagggggctcagcacccatttctctagatagcaccttccttcctctgaggacagactctcactgaagccccggtaggaggctcagcacccatttctctagatagcaccttccttcctcaggacagactctgactggaaccctggtagggggctcagcacccatccctctagatggcacctgccttactctgaggacagactctgacgggagccctggtagggggctcagcacccatccctctagatggcacctgccttactctgaggacagactctgactggagccctggtagggggctcagcacccatctttctagatggcagctgccttactctgagggcaggagcttgctttgtatgttccagtcccttctgagaaccagaagcctgagcatctattagaaatgcaggattgtggacccaatcttagacctagagagctagactttgcatttgaatgagagctacaggtgattcaaaggtgactgcatgtgtgggtgcagtggctcttgcctgtaatcctaggttttgggaggccaagatggggggattgcttgaagccaggaattcaagtcctacctgagcagcaaagtgagagcacctctctacagaaaaacaaaagcaaaaatgtgactgcatgttggagccacctggctttttttaaataaaaaagatccatatagctggacacagtgactcgtgcctgtaacctcagctactcgggaggctgaggcaagaggattgcttgagcccaggagtttgaggctgcagtgagctatgatcatggcactgcattccagcttgggtttcatctgaaaaaaaatttaaaaaattcatctagttccacctcagagcttctgattttatttccatggatgtggcctgggcttgcgattttctttttcttttttttttttttgagatgaagtcttgctctgttgcccaggctggagtgctgtggcatgatcttggctcactgcaacttccacctcccaggttcaagtgattctcctgcctcagcctccctaatagctgggatgacaggctcgtgccaccacacccaattaatttttgtatttttagtagagagagggtttcaccatgttggccaggctgatcttgaactcctgacctcaggtgatctgcccgcctcggcctcccaaagtgctgggattacaggtgtgagccaccatgcccagcctggcctgaggatttttgtgagcactcctgatgctgttgtgtagccaggagtgaggactgccctctgatcacccagcacagaacgttcagggccatgttgggacagtggactggtaagggcgagaggaggacactggggagcaggctgtagggtgccacagtccgccacagtcacaggctcatgctctccgtccgagaggaggcagaactgcttttaccaaggctcatccagccctcttcatttctctgggaacaatttttggtttcgtgacccatttcttaatccccggaaggcatttctctgaactggtgccaggcaccccggcccccagctccagttagttattattcgaggctgatttcttttctgtctgtcttccttctaattcctagattggtgaacagccacctcacttccagtttttgccggggcctcttttcagttctgagcaccagccagagtctaactgaattggacctcagtgacaattctctgggggacccagggatgagagtgttgtgtgaaacgctccagcatcctggctgtaacattcggagattgtggtgagtccccgtgcatgtgatctgtgtgagtgcaagttcatatgagagagagagagagaaacagactggagaaagatcttcaggaccaggttgctggtgtggtttctttcttttctttttctttttttctttttttgaggcagagttttgctcttattgcccaggctggagtgcaatgccgtgacctcggctcactgcaatctctgcctcctgggttcaagtgattctcctgcctcagcctcctgagtagctgggattacaggcacccaccaccatacccagctaattttttgtatttttagtagagatggggtttcatcatgttgtccaggctagtctcgaagtcctgacctcaggtgatccgcccgcctcggcctcccaaaatgctgggattacaggcatgagccaccgcacccggccggtggtgtggtttctgctgtaacaaagtgccacagactgaatggcttcaacaacaaaaattcattttcttgcagttctgaggccgaaagtctaagatcaaggtgtcagcagggttggtttcttctgaggccgccctccttggtttgtagatgcccccttctccctgtgtactgatgccatcttgccttggggggaagagtggcctagtctcctcttcttacagggacagcagtcctgatggattaggcacagtcaggcatgactacacaagacctaatgttaatctagtcactcctttaaagaccccatttcccaaaacagccacattatgaggtcttgaggattagggcttcaacatgtaaatttttgggggggcacagttcagcccagaacaagtgagaaggtagaatgggttggaggccagctggggaagttttgtgtggggaagaatgaatgaggaactaaaaaaaaagtcatttcttgaaacaaccatgatgctcgatatattccatttcctcatgggccatgttcatagatgagagttggagaatttgccatttacaacaatggcaacctcacctaaaaactatgaaaatactttttttttttttctttgagacaggacctctctctgtcacccaggctggagtgtgtgatcacagcttactgcagcctcgacctcccaggctcaagcaatcctcccacctcagctcccccgagtagctgggactacaggcatgcaccaccatgctggctaatttttgtattttttttgtagagatgtggtctcatcacgttgcccagcctggtcagaatgctttgtatgggttgaaatgtcacagggaatctcctgtgactttattaataatgtgcttgctcacacctgtagtcccagctactcgggaggctgaggcaggagaactgtgtgtacccgggaggcggagatggcagtgagccgagatcgtgccattgcactccagcctgggtgacagagcgagattccatttcaaaataataataataataataataataaaaaatgtgcttgctttctcccacaccatgaatcagattcacacgccccaccgcgctggtgcctgggccgcctcactagctctgtttcattccctgctctgtggacgcatgcaggcgtctgcatttttgaggagctgcacagcaagtgttaaagtccgccactctaggacattttgctacctccctctccggctcaacacactcaccttgtcaccagtcttatcaatttttcctcctacccgagctgttttccacttttcctcgtcctcaccccaccagcccaggtccagcaactgtcaccacttgcctggacacgcagtgacctcctagaccatcagctccccggggatggggtttgcgtttgtttgtcttgctgtcatctttgccacgcctggacagacatcttagtacccatcagtggtcaaaagcacgcactgaatgaatgttggctctttggtctccctgtgtctgcctttttccctcacccgaccattctctgcacaaaagtaagatggtcctttagaaaattctgattcgattgtgctgttcggtggcttaaatgctttctgtctgctctgctctttattttttactttatgtatttatttttgtagatgtagggggcgcaagagcagctttgtttcatggatatgttactgcacagtggtagtgtctgggcttttactgtaactacccctttttttttgagatggactctcgccgtgttgcccaggctggagtacagtggagtgatctcggctcactgcaacatccacctcctgggttcaagcaattcttcgagtagttgggattacaggcatgggccaccacgcccagctgatttttgtatttttagtagggacaaggtttcaccgtattggctaggctggtctcaaactcctgacctcgtgatccacccgcctcggcctcccaaagtgctgggattacaggcgtgagccaccgtgcccggccttagtgtaactcttacccaaatagtgaacattgtacccaataaataattttccagccctcacctggctcccaccctcccacccttctgaggctctagtgtctatcattccatgctctatggatgttaccctttgtttagctcccacttgtaagtgagaacgtgtggtatttgactctgtttctgagttgtttcacttaaggtaatggcctccagttccatctgtgtggcttcaaagatgtgacttcattcttttctatggctgagcagtattccattatgtatatagatcacactcttcatctttgctcttttggtaaatttcaaatcgtagtgccatggagactggttgtttgggacatttaaccttatttctccaacttcatgcccaaattctctccccactgccattgcccctgtatgattctggagaggcagacacaaacagggaagggtaggggacagtgagatgcttcgcagagaagtagagatccatttgtccatttgcttgaagttggtgtaaggatagggacagaaaggaaggtggtctaacaggctccaggacctatgaactattgccctggaaagaagctagaatgttgttcttgcccccatgacagggataaagtatagtttttgttgctggtggtggtggtgacggtggtagtgatgtgcgtgtgtgtttgtgtgcatgtgtgtgacggggaaactaatcaagaatcagagctgcagcgggatgtggaatcccagcactttgagaggctgaggtgggcagatcacctgagcccaggagttcaaaaccagcctgagcaagctggtgagaccttgtctttagaagataataataataataaaaataaaatataaataaaataaaatggctaagcatggtagcacatgcctgtatttgcagccacttgggaggctgaggcaggtggatcccttgagcccaggagttcgaggtggcagtgagctatgatctcgccagtgcactccagcctgtgcaacaaagtgagaccctgtctttaaaaaaagaaaagaaaagaaaagaaaaagaatcagagctgcttttcctttcaatatagatggagggctgggatgaaatcgtcaaacacaatggggtgacaatgttggtgaagacaagaaatagctgagtgcagcactggcgagggcagtgccgactgcgggcacgtcaatggttaggaacacgagggaaggaggtgggtgcacaggcccacaccgcccgcttcacttacaaaccaggagcgcaccattcacatgtctggggggtgatctcaatgcacccggcactgtttacggccgggagttcactgacaggtgatccctctgctgtgactggggagactgggggctgacctcccaatgtgccttgtgctgtattccggagctctctggtcaggtgtattctgatgctttctctattccagagctctctggtcaggtgtgtcctgatgctttctctattccagagctctctggtcaggtgtgtcctgatgctttctctattccggagctctctggtcaggtgtgtcctgatgctttctctattccggagctctctggtcaggtgtgtcctgatgcattctctattccagagctctctggtcaggtgtgtcctgatgctttctctattccagagctctcttgtcaggtgtgtcctgatgctttctctattctggagctctctggtcagatgtgttctgatgctttctctattccggagctctctggtcaggtgtgttctgatgctttctgtattccggagctctctgatcagatgtgttctgatgctttctctattccggagcttcctgatcaggtgtgtcctgatgcttcctctgttctggagctctctggtcaggtgtgttctgatgctttctgcctctgttcttggcatgaaggttggggcgctgtggcctctcgcatgagtgctgcttcgacatctccttggtcctcagcagcaaccagaagctggtggagctggacctgagtgacaacgccctcggtgacttcggaatcagacttctgtgtgtgggactgaagcacctgttgtgcaatctgaagaagctctggtgagtcgagcccgttcccctaaggaagttctgccagcgaggcgtgctgcgcactctggcttcagtgaggcccggtgggctggggtttgagtgagaatggccttggcggctcgggtgactgcgtgtgcttgtcttggggtgtctagcattgcggtcagtgagtgtttgtcgtggggaaagccacacactcaaccctgacaaggagcataaataataacaaaaagaagatgtctgcctttagggtgcctactgcctagctgacaaaaagaaaaaatcagtgtaatgcattgctttagaggagttttagaacttcatgacaagccctgggtcctcatattgtataagaaaaatggtgctaaagcaatgcagaccctcgatgttgtatgcagcccttccctgagtgcttctgggagacttgcattttgaaggagagaaaaaaccacttaaaaatggaagggccatttctcacccattaggatggctattatcaaacaaaagcaagaaaactagaaaacaacaagtattggtgtgggtgcggagaaatggaagccattgtgtgttgctggtgggaatgtaaatgatgcagccactatggaaaacagcacagcaattcctaaaaaataaatacagaattactactggagccagcatttccactgctgggtatatctgcaaaagagttcaaagcaggaactcagccaggagcggtggctcacacctgtaatcccagcattttgggaggctgaggcaggtggatcactggaggtcgggagttcgagactagcctggccatcatagtaaaaccttgtctctactaaaaatacaaaaattagccaggcatggtggtgcatgcctgtaatcccagttactcggggtggaggcaagagaatcttttgaacctgggaggcgggggttgcagtgagtcaagatcccgtcactgtactcccgcctgggtgacagaggaagcattaaaaaaaacagaaggcaggaactcaaacatgttatttgtacatctatgtccatagcaacactattagaaatagccaaaaggtggaaataaccaaacgtccttcaacggatgaagggtgttgaaaagtgctatatatgtacattcagctttaaaaagaattctagtacacactacaacatggatgagcctcggggacattatgctaagtaagataagctagactcgaaagggcaaatactctgattgtccttataggaggtgtctagaacagacagattcatagagacaggaagaaacgtggttgcaggcaatgggagggcggagagtgggaagacattgtttaatggttatggagtttcagttctgcaagatgaaaggagttctggagatggtggtggtgatggttgcacaacaatgtgaagtgcttaaggccattaattgtgcacttaaaaatggttaaaatggtaaattttattttacacgtattttaccacaataaagctgaatgtagggagctgggaagatgtagtattggtgggagcttggagaatgcttacttgttattccaccaaatggaaaaggaaatcagaagtgtacatagagcttgtgtccactccctttccatgtgtaaactggagtagaggcagtggcaggtacgggtgcttccttgtccatggtggagcgtgggtgagagacatgactgacattctgccatctctatggaaggttggtcagctgctgcctcacatcagcatgttgtcaggatcttgcatcagtattgagcaccagccattccctgaccagactctatgtgggggagaatgccttgggagactcaggagtcgcaattttatgtgaaaaagccaagaatccacagtgtaacctgcagaaactggggtaagtcttcatgggtgtcttaccagaaaagtaacttcttttcagaggtgaattatttggaaaatgtggatgggggttactttggtcaggcagagctgaaggtagagtaaggaggtaaaaacatcagaaatgctttgaaggactggaggcatataatgtatactgctgctaataagataatttatgctaatttatgattatagaactagagtttcttagtgttggaagaaaccttagagatggtgcagcccaattgcctgttgagggaaaaacttgcttccaagacactcacatgaatagtcacccattttatgtgtgcatgcttgcaagcatgcaagttatcgcatagtgcatgcagcctctacactaggaaagagctctcaccctgcagcctctacactaggagaggactcttacactgcagcctctatatcctcaacagtgtcatggctcagcaccttcacctatgtagccatgctctcccaggtacacaggctggtttgttagtgtctgtctttgaaatgtggtgcccagacctgatgatgcatggtggatgttttacctcctgttgcagagaactatggtttcactggtggaatctctgatttccttgttttttttggcagttacataagccttttgattcatgttggaattctgcagtaaacagtagtagggaatacccactaataatcatgcactttccctgtaccactttcctgtatcactttccctgtatcacctgctctttcatgttcttacatggattttctcagttggcttcagaaagatgctatagggtagggtatctgtgtctccaatttaaagaggagaaaataaaattcagggagcctcataactttgtccaaggacactcagagagaaggtagtggaactcagtgtagacaaacgtctgtgacctcccaagccactgccttaattcccagtgcattgccttaggagatgttgctaatgggctctctacagggcttcttcatctggctctcagcttaagggtgggacctccaatttagctttgctaaacctcatcttacctgtcttttgacccattgactaggcagttttgaatcttcattctgacaataatatctacaaatacaataagcaaattggataggtcttcattcattcacattattaatatatataccagccagatcagcattcaagacaaaatttggcaggaaaggtcttcccagaggagtaatccactaatccataattaacaaccaacctctgttcacaaagctctgatacttccttggacctctcccatcagccaatcctcagatgtgaccatatctctttctatgaagtcttcctgcagtgccttcatttcctcgccttagggtattacccttccttagcaaatcgccttagaatattactcttccttggcaatttgacttctgcttctctaagtttgttcaacagacatgattttgtcccttcattttgcaggccctctgggggctctgtggtgggcactgacagcagcagtgagtaaaacagaccaaaatcctgttttcacaaccgttcttttagggaagtgataacagataatagacatgctaaacaatataccctgtgtataagagctataagaaaaactggagtgacggcgaggggtgcttctctgctcacgtttggcgagtgcctctccgagcgggtgacattggagcaggtgctcagtgaagcgtgggatgggctgtgaaggagccggaagagccctccaggcaaagcagatggaaccgaagaggcccaggcgtaggcactcaggtgactctcagtgatcctggttccaaattccacatgacaaacaagccaattacaaatgtgcctgatgcatctgtaatatgctctatgtagttactattgtcaatacctaacctggtagagctgctgtaataaagtatcacaaacagagcggcctaaacaacaagagtttattgcctctcagttcaggaggccaaagtctgagactgaggcatcagcaggctgggtccttataggtcgtacaggtccttcccagtccttactttagttgacatctgctgcctttaattcatttcactcttcctctttggaagccttcttcgctcttatttttaggtcactacttagtctttcctgctaatgttatagcttccccctccctggatcctgcattggcttctcttcctgtggtctggggatttcacgactggtttagttgtgtttttttttttttttttttttttgagttggagtcttactctgtcacccaggctaaaatgcagtggcgcaatcttggctcactgcaacctctgcctcccgggttccaacaattcttctgcctcagccttctgagtagcagggactacaggtgtgcactgccatgcctggctaatttttgtatttttagtagatacggggtttcaccatgtttgccaggctggtctcgaatttctgacctcaggtgatctgcctgccttggcctcccaaagtgttgggattacaggcgtgagccacacacccgcctggtttaccttttttgttgttgttgttactaaatatttctaaactccctgagaattctcatatacctctcaatttcaacaacagtaggtctcaaacccagatatcattcacaaactttttattagaaaagtaacacatgcttggtgtaaacatatcatagtacagacaaagtggaaagtgaaagctccttctcagccctcttctgagagagccatttacaatagtctgatgaacaaccatccagactttttttaatacaatagattgttatataatccattcatctgtccatccatccatccatccatcatccatccctctattttccatccgtcaatccatccatccatccatccatccatccatccatccatccatcaatccatccaagggagtatcagagctttgtgaacatatattggttgctaattatggacaaatggatttcctgtatatgctgatctgggtggtatttatatcagtaatgtgaatgaagacctatgtgattttcatgttgcatttgtaatacattgttatgtagtattttaaatgcctagtctgttagagctactgtaataaagtatcacaaacagagcagcttaaacaacagaaatttattgtccctcagttctggaggccagaagtgtgagattaagatgctagcaggctgggtccttctgagggctgtggggaatctgttcatgcttctctttggcttctggtggaatgtcatcttgctgacacattttgccattccttgacctgtagatgcctctgccacaccattgcctttatctctacgtggtgtcttccctgtgtctgtgtgtgtctttctccatgtcccaagtttccctgtgaaagaacacaagtcatgttagatttgtaacgacctgatcttaactaattacattttcagtaaccgtatcaccaaataaggtcacaatctgaagtactggggcctaggacttccacatataaagtcttagaggaaacaattcaatccataacaccctatctattgaaactagaaccataatataaatatttttctgtgatatccttttttcatttatcatggataaatttccatgctgatttgtgtagatctatcgattggggcataatatcccatagtgtgctttaccataatttatttaatcaaatcatgcattttgggataactgttcttttccactattacaaacaactctgcaaaaagcacatttgtatatatagttttatgcatgtgtatttgctttgagataggtatctataagtggcattaatcagtcgagacttttatgcattttatgtgttaggtacagccatacatgtggctgtgtgttaggtatagcctatgggttaggcatagcctgtgtgttaggtatagcctatgggttaggtatagcctacgtgttaggtatagcctatgtgttaggtatagcctatgtgttaggtatagctacatttttttctctcgaactttgggtcctcatctctggctgcatattgtgtactgcctgtctcaatactgctcaagggtcacacatgctgagcatttgcaacattggtttaattatcataccccaccttccacccccgttctctgacctgctcctgccctcttcctcctgcctcattgaatagtggggctttccaggaggctgctgagtgagtaaacgggggacggtcctaaatgctctgctttcggttccctctaccactcatcactacaccagagggaactttttaagatgcaaatttgaaaatattgaccctttgttcaaaaatcttcaaaagttcttctctgcagtcagagtgacatcttagcttggcacacaaggctgtccctgatactgccctctctcctgccataccttgcactccattttgagtcatattggatgagttttgttttgctgttttagagatggggacttgctatgatgctcaggctgaatttgaattcctgggttcatctacagccataccacccagagtgcctgatctcatctgcactcctgggctcaagcaatcctcccgtctcagccgcccaagtagctgggactataggtggacatcactgtgcccagctatgaattagttttgaaacatcttggtggttcttttaatcttccttattcttgctactcttttccttttgcctggaaggttacccccactttcccactttctactatccatctaagaagctcctacttattttttaattactgtgatcctcattttgtccatttaaaagcagggataaaactaacattcccatcttgaggttgtgatcattcaatgagataaccctgtttaaagtcgtcatccatgtcaagcacacaataaatactcaaaaaatgtttgatcttcttcttcagattccttccttccttccttccttcttcctcctcctcctttctttctctctttttctttttctctttctttctttctttctctctctctctctttctttctttctctttctcccttcccttcccctcccccccccctttccctttcccctttcctttccttattttcctttcttttcttttctttttttaagacagggttttgctctgtggctcagactggagtgcagtggtaggatcatagctcactgtagccttgaactctcctgggctcaagcaatcttcctgcctcagccttctgactagctaggactacaggtgtgtactaccatgcctgggtaatgtttaaaatgtttaaaattttttatgtagagacagggtcttgctatgttgcccaggctggtctcaaactcctggcctcaagtggtcctcccaccttggcctcccaaagcactgggattcagttttcattatgagacagttttgtgacataggcaggtagttaataaataaaaatccccaaccaattaacttaatacagtacatggcaagatatccgtgcttggtaaatgtagagctcagttaggtggattggttgaaatcgagatgtcaatcacattcctctaatccaaggattggttggtgggacatggttgtttgattctttaaacattttattatgtgttcagtgtaaccgttgcttaatagttaccagcattttcacaatttggatatgacgttttcttaacaaaactgcaccgtctgttgcaatttctactactactgtgtagtgctccccaaacatctgttgaataatccattctactcctttttggaaatagtggtaaagcctgcataactttaattacataatttaaaaaatattttctcttttcctctttgaagaccatccccattctactagaatgtccctggcctttgccaggaatgctactaatcccttctgcatgttaattaacaacaaccctctgatagaattcttaccggggatgagagcttagtagaagccactcaaaacttgctttgtttttgtctgtctctcttgggcttcatttgcctattagtcttacttactgtgtcttttcagtttgactcttccttaattgggaagatagaaaccagtggatggataatcactttttcctgctggtcatctgttcatgctttactgtctgaatacactttttctgtatttctatttttcctgcctcgtagacaccaaagagcttaaaaaacatgccattgccaaggactctggcaggaaggaggcaatcacctgcgctattcctggcttcatggaatagaagcatctgtgctcctaggaattacgccaccagtgattttagagctcttatgctcttcctgggtgatagaatgggcttaatttgactcaagaatagtacatcaaaactcttaattccatcgagattgatgcatttttggggttttatgctctaaaaggccttttgctgtgcagaaggaagagagaggtggacagaaagggcagtggggagaagatgagactaaaaggtggaaagtccaggtctggatccctccccaccacacacctgctctgtggccttgagagaaacatgtaatttttataagccttagatttctaatatgtaaaatgtatgtaatagttttagctgcactccttccttgccaggttgatataataatcaaataagactggtctctgggtcaggcacagtggctcatgcctgtaatcccagcactttgggaggccaaggtgggtggattgtctgagcccaggagtttaagactgcagtgagctgtgcacttggcctgggtgactgagcaagagcctggctttttctatttatttatttatttttgagacagagtctcactttgttgcccaggttgaagtgcagtggcaatctcggctcactgcaacctctgcctcccaggttcaagcaattctcctgcctcagcctcccaagtagctgggattacaggtgcccaccaccaccctaactaatttttatatttttagtagagatgggctttcaccatgttggccaggctggttttgaactcctgacctcgtgatccaccctcccaaagtgctggacctcccaaagtgctgggattacaggcataagccactgcacctggccttatttatttatttatttaggcagggtctcactctgtcacccaggctagagtgtggcagcgcaatcatggctcactgcagcctcgacttcctggactcaagcgatcctcccacctctccaacgtggttgagggctgcagcgagaaagatgtgaaaggggcatttgggggcgcaggaaggcgggaggtggcaattgctaagggccccgccgtgttcctgtcacagccctagctacagcttagaaggtcacaatggacgttcacctgttgtctttgatgtttaaatcagcaccgacttcccatgaggaggatttttttttcctgtctctcttaaaaaaaaaaaaaaaggcccctgcagtgtgggtgtctgcagtgttacggggattattagttgaggataaccactgggatgtgtttctggaagaagtggtgctgaggagcactcctggccggaggaaagctgtgtgaggaggaggaggagtatggggtaactggctcagtttgccttggctctttctgtcggactcatacagcaaagcatctgctgagacatcatttgtgtctcctgtgacagccagagacagcaggtcttgctctccccagatcatatctgagatgctggctcctgctctctgagctgaaggctgcagctgctgagagaggacgaggcactgagtcaaagcagctgcacaatgttggggaacagctgggtactgaggactcttctccctgtccttctacaggttggtgaattctggccttacgtcagtctgttgttcagctttgtcctcggtactcagcactaatcagaatctcacgcacctttacctgcgaggcaacactctcggagacaaggggatcaaactactctgtgagggactcttgcaccccgactgcaagcttcaggtgttggagtaagtcctttggtttattacagcaatgagaacacatggtggccaagggtggagggacgtttaggcagagtggccacaagataatctgtatcttagaagtgaggtgtcttcttagtgtttgccttgttacaggatcatgggactgggaggagtccttccagatgatatagatgtaggaacttgagtccttaccatcacagttttctgtaccacaaaacaaggagggcagtatgacacttacattttatggaaatgtagggaaaggcacagaatttggtaaatcaatgaacaaaccactgttactaatttgatctgtgcaatgcagtggatttgaaaaagagagagaagaataattaccagcatacaaggctgcttgaagctagttagtcctgtgctcctgtgctttttttttttccacctgaaacaagacaggctaagatgctaaaatcttggggagctagggggatggttaaggggacattttctttaaatcaccccctttttgcagattagacaactgcaacctcacgtcacactgctgctgggatctttccacacttctgacctccagccagagcctgcgaaagctgagcctgggcaacaatgacctgggcgacctgggggtcatgatgttctgtgaagtgctgaaacagcagagctgcctcctgcagaacctggggtgagtgtgctctgcagagatgcccgtggtgggactctgagttctcaggaaacgttgactgttatcaaaatccaggatggctctcgcttcatttgcagccactcaagattaggttgggcctgggtcagttgtggtggatattttaaaatagagaatatggggttaaactacacattccacttcactgagatggttagaatcaccaaggctaagctggatttcacccacattccccaaagaaacacaagccctcatgcgatcatggccaaggaggattctgttctacacaaggaaccgaacttcgtagaactcgtctatgggtcatccaaattggaagggtctttacatagtggggatcttgttgttttgtttctgaggatttattttttttttccttgagacagagtcttgctctgtcgcccaggctggagtgcagtggcatgatctcggctcactgcaagctccgcctcccgggttcacgccattctcctgcctcggcctcccaagtagctgggaccacaggcgcctgccaccacacccggctaattttttgtatttttagtagagttggggtttcactgtgttagccaggatggtctccatctcctgacctcgtgatctgcctgcctcggcctccccaagtgctgggattacaggtgtgagcctccgtgcctggcggtttctgaggatttctaaatgggaaaagagtgctccaggaatagcaagatgggaaattacacgaaattcgacagtgtgtcaggatattgccagcccacctctgtgatactactgaggtagtcgtctcctctctagcaagagcttcctggcgagtcccacggttctgtcagccgtgatgattgcacttttccctgaagacgttttcactgcttggctttaaggccaacatgctctcctgggttttctcctatttcatcagatccttctactcagtctcctttctggcctcttcttcatcatcctgacccttatgtgttgaatcctcagagcttagtcgctgggctaatttttcttccctacactttctccctcatttaaattatctggtcttctggcttcatgatatgtgtgctgtggcctccagattatatgtccataaattctgtgtctccgtgcttggctgatctttcttcttgaaggtttaataaacctctcaaacgtcacatctagatccacacccttgctactctcttctacccgaaacctgattcttccccatttcagtcgatggtcacttcctccaagttgctcgggccaaaacatttctggttctgtcgtcactgtctctttttccttataatcatgtccaatgtgtcagcacatcctgtgagctctgccttcccagcttggccactccctgaccacttcaggccagcttcacggcttcttccttggctcaagccaccatcacctggtgtctggattgtcatggtggcattctgacaggtcaccctgcatctgttattctgattttagcagacaagggattcagctaaaacgtaactcgcatcatatcactcttgtcaacatcgtcttcttatcactttcataatcagagcaacaaactcatggtggcttccatgccccacataatccagcctctcctgcttccgaagattccgcttctcccaacccttgcttattctgccccagtacagtgatctccttgctgttttgcaagaacactgtcatctctggatttttgcacttgcttttcttctggcctagaactctctccccttcagtatccacctgcattattccctgtaccttcctaaattctctgcttaaaggtcttctctgcgaggctgtctttgactattctactgaaaatagaagcactttttcttctcttctcattctcctctgcagtgtagcacatcttatgtgctatgtcattttcttgtttatttattatctatctctgctcccaaaatataaattccattagtccagggacttctgtccatattaatgatctcaaggctgagaacttgttggaatgcaggtttgaataaatacaagtttgaatcagccttgcatccttgtgccaacataatggagcacatttgctgcaggacaagccaatattcccagagctaagagagatgggggaacaaacaaaggattggtcaggtcaaagctggggacactgctacatgtagcatcactgacctagccctgagggacattctggacccaggctgagggacaggctcaaaatagattgaagaatccatgaatgcaatcaacccgttttctcaggctgcgataacaagctgctttagactgtgtgactcaaacacagatttattatctcacaatactggaggctagaaagtccaaaatcaagtctctgatgaatttggttgctggcgagagtcctcttcctgatttgcagatggctaccttcttgttatgtgattgcatggagggaggggaggcaagggagagaagacaggggagaaagaacaaactctctgatatctctcctgtaagggcactcaccccatactgagggccccaccctcacaacttcatctaactctaactacttcccaagggcctcacctttaagtaccgtacattaggggttcgggcttcatcatgggaattgttaaggaagacaaacattcagtatataacaccaccaaattgagatggttataaatggtgcaggacaaatgggtggatttattagttaagttgcaagggaaactttattaaagaggaggaagaacttacatcgaagatgtgagaggcatcctgggcaaatgcaatgtgtagaattgatcaggttagtgactaaatgaacataaggtaaaaaaatttacaagacagttgaggaagcgtaaatgctgactggacatacagtgatactaagaaattattgttaaacgattttggtgtgatagtgacattgtaattatattttagtgtcacaaagtgaattattgatagatgcattaaatgcagtatttaaaataatccatgggtgggaggagtgggtgggcaatagaagaaacaagttgacatgacctgtttaattgtcgaacttgggtaatggacacagggggttcattatactattttctatacttttatgtatgcttaacattttcccaactagatagttaaaaatataacaggaaccacattgggcacttagagcttttttttttttttccccacatttttattgggagccgtgggaggggcctcctctgtcattggaggtgctcacagtttcttcagccactccaggctggggtcctgggggtctgaggctcccagtgacgaaggacacgacgagcaccggctccttggcccaggcattcttgaagaaggtgcggagtctcgcggccatcttggtctcggcggcggcgacggcggcgaggacgcggagcactctgggagttgtggtccctcttttttttttttttttttttttacattttagaagtgtgtggagtttagggaaatgaagagatgagacttttaaggttaacgactctgacagagttatctgaagagtgcaacccaggctttctatttgcttttacaggttgtctgaaatgtatttcaattatgagacaaaaagtgcgttagaaacacttcaagaagaaaagcctgagctgaccgtcgtctttgagccttcttggtaggagtggaaacggggctgccagacgccagtgttctccggtccctccagctgggggccctcaggtggagagagctgcgatccatccaggccaagaccacagctctgtgatccttccggtggagtgtcggagaagagagcttgccgacgatgccttcctgtgcagagcttgggcatctcctttacgccagggtgaggaagacaccaggacaatgacagcatcgggtgttgttgtcatcacagcgcctcagttagaggatgttcctcttggtgacctcatgtaattagctcattcaataaagcactttctttatttttctcttctctgtctaactttctttttcctatcttttttcttctttgttctgtttacttttgctcatatcatcattcccgctatctttctattaactgaccataacacagaactagttgactatatattatgttgaaattttatggcagctatttatttatttaaattttttgtaacagttttgttttctaataagaaaaatccatgctttttgtagctggttgaaaattcaggaatatgtaaaactttttggtatttaattaaattgattccttttcttaattttaaaaaagagtacctagaaatttttcaaattatttctctaaaccactaaagataaattaaattgtttggtgcattttaaaagtcactttggcaaatgattccattgtagataatttttaaaacgttacctcactctaactgtaatgagtggaatttcatctttgataggataggagattgaaaatcgtggagggaaaggtttgagagtatcagagcctgcgctcctaactagaagtattatgtagaagatgcatcttgctttcagttgataacagcttattttggatttatcccatccgaggaacagttcatctattatacttcacagagcattaagttataaggaaatatttactaattgcttctctacacatggacaactcttaaaccgcatggaattgctcaggatggaaatactatttcctctgtacaattagccatcaaagtagccacactttgctactcaaagtgtagtctatgaactgtcgatataaggagcttgtataagaatgtaaaacaatcacattattaaacataccttttagatgagctgacatttaaaaaaaaccctgaagactatttttataagggaaacagtatgagatttacattctgttgcaaactctgtcttgttagcacttctgagcagcaccaactggagactgggtttctgcatcttggtgaactattaccgactgccttcctgctacaaacactttgataacctatataaataatgtaatcagaaacacatagctgagcttgaaagagagaaagagaacctttgggcattaggacattaaaactggccaggttgctgagaatgccattatttcattcctttttatggctgaatagtatttttccatggtatatatctcacattttctttttcttttttttttgagatggagtcttgctctgtcgcccagtctggagtgcagaggcgcgatctcggctcactgcaacctccgcctcccgggttcaagcaattctctgcctcagcctcctgagtagctgggattacaggcgtgtgccaccatgcccagctaatttttgtatttttagtagagatggggtttcaccatcttggccaggctggtcttgaactcctgaccttgtgattcacccgcctcggcctcccaaagtgctgggattacaggcatgagccactgcgcccagatggttccatatttttccaattgcaaattgtgctgctataaacacgcatgagcaagtatctttttcgtataatgacttattttcctctgggtagatgccccgtagtgggattgctggatcaaatggtagatctactttttgttctttaaggatccacaatgttttccatcgtggttgtactagtgtttgtactagtttacatttcatggaaaaactttctatagaagaaaatgtgaactacagagaaaaaaaaatcaaaatcacaggaagaagatagcaatctacttcattcctggaattgtctgaaaaagtcgtgtaaaatttgtggagatttaagtatatggagaaaaacacttattcattgtaagtaaaataagattgtatttcagcttcatcttgtgtatacttaggagtaatagaaaagagacaaatggggagagaataaaagaaatataggaagaggaaaagagaaaagaatcaggaaattggaagtgaaataattccacacatacttattgaagtctatttaaacaatgcttaaaaatatatggcctcttagaattatacgtttaaaatgaactttgtcgctatgggatttggggcattataacaggaagtgagatgtttgaagacagggtttttgagctctctgggtattaactccttaagtgaaagatgctctgagtgcacaatagacttgtgctgtgttctttaattgatggagatgctacatctcatgtcctcatcatccacagagcctccagatcctggccagaagtctcctcagagcccccttcatatctttatttctcagggtgtaggtgaagggattgagagtgggggtgattatggaatagaagagagaaataaatttgccctgctcttgggagtagctggaagggggctgcagatacatgtaaatcgcaggtaggtagaagagggagacgatcatcaggtgggaggaacacgtcccaaaggccttgtgtcgtcccttggaggactggatcctgagcactgcccgggcaataaagccataggagagaaggatgagagccaggggcaccaacacgaagaaggccaccagcacagccagtatggtgtcattcacagcggtgtcagcacacgacagcttgatcacggccggcacctcacagaaaaagttgttcagcacctgccgcccgcagaatggcaattgcaccgtcaggaccacctgcacgaaggagttgccgaagccactgagccaggccagagccacgagctgctgacagagagcacggtgcatgagaacggcatagtgcaggggcttgcagatggccacgtagcggtccagggccatggcggccaggacgatgcactccgtgcatcccagccagtggaagactgcatattgcacagtgcagcctccatagctgatggtcttctgggaactgcccatgttgaccagcatctgagggactgtcgtggtggtgtagcagaggtccaggaaggacaggtgactgaggaagatgtacatggggctgtggagttgaggatccacccgggatgccaggatgatggcgacgttccccaacatggccagcacataggacagcaggaggaccacaaagagagggagttccagccacggcctgtcagacacacccagaaggatgaaggctttaggggagtcccctaagaagctatggttgtcacttttcatgttgcggcattttctggc

SEQ ID NO: 2 - DNA, 4470 bp, Homo sapiens
gtagatgaggaaactgaagttgaggaatagtgaagagtttgtccaatgtcatagccccgtaatcaacgggacaaaaattttcttgctgatgggtcaagatggcatcgtgaagtggttgttcaccgtaaactgtaatacaatcctgtttatggatttgtttgcatatttttccctccatagggaaacctttcttccatggctcaggacacactcctggatcgagccaacaggagaactttctggtaagcatttggctaacttttttttttttgagatggagtcttgctgtgtcgcctaggctggagtgcagtggcgtgatcttggctcactgcagcctccacttcccgggttcaatcaattctcctacctcaacttcctgagtagctgggattacaggcgcccgccaccacacccggctcatttttgtacttttagtagagacacagttttgccatgttggccaggctggtcttgaattcctcagctcaggtgatctgcctgccttggcctctcaaagtgctgggattacaggcgtgagccactgtgcccggccttggctaacttttcaaaattaaagattttgacttgttacagtcatgtgacatttttttctttctgtttgctgagtttttgataatttatatctctcaaagtggagactttaaaaaagactcatccgtgtgccgtgttcactgcctggtatcttagtgtggaccgaagcctaaggaccctgaaaacagctgcagatgaagatggcaagcacccgctgcaagctggccaggtacctggaggacctggaggatgtggacttgaagaaatttaagatgcacttagaggactatcctccccagaagggctgcatccccctcccgaggggtcagacagagaaggcagaccatgtggatctagccacgctaatgatcgacttcaatggggaggagaaggcgtgggccatggccgtgtggatcttcgctgcgatcaacaggagagacctttatgagaaagcaaaaagagatgagccgaagtggggttcagataatgcacgtgtttcgaatcccactgtgatatgccaggaagacagcattgaagaggagtggatgggtttactggagtacctttcgagaatctctatttgtaaaatgaagaaagattaccgtaagaagtacagaaagtacgtgagaagcagattccagtgcattgaagacaggaatgcccgtctgggtgagagtgtgagcctcaacaaacgctacacacgactgcgtctcatcaaggagcaccggagccagcaggagagggagcaggagcttctggccatcggcaagaccaagacgtgtgagagccccgtgagtcccattaagatggagttgctgtttgaccccgatgatgagcattctgagcctgtgcacaccgtggtgttccagggggcggcagggattgggaaaacaatcctggccaggaagatgatgttggactgggcgtcggggacactctaccaagacaggtttgactatctgttctatatccactgtcgggaggtgagccttgtgacacagaggagcctgggggacctgatcatgagctgctgccccgacccaaacccacccatccacaagatcgtgagaaaaccctccagaatcctcttcctcatggacggcttcgatgagctgcaaggtgcctttgacgagcacataggaccgctctgcactgactggcagaaggccgagcggggagacattctcctgagcagcctcatcagaaagaagctgcttcccgaggcctctctgctcatcaccacgagacctgtggccctggagaaactgcagcacttgctggaccatcctcggcatgtggagatcctgggtttctccgaggccaaaaggaaagagtacttcttcaagtacttctctgatgaggcccaagccagggcagccttcagtctgattcaggagaacgaggtcctcttcaccatgtgcttcatccccctggtctgctggatcgtgtgcactggactgaaacagcagatggagagtggcaagagccttgcccagacatccaagaccaccaccgcggtgtacgtcttcttcctttccagtttgctgcagccccggggagggagccaggagcacggcctctgcgcccacctctgggggctctgctctttggctgcagatggaatctggaaccagaaaatcctgtttgaggagtccgacctcaggaatcatggactgcagaaggcggatgtgtctgctttcctgaggatgaacctgttccaaaaggaagtggactgcgagaagttctacagcttcatccacatgactttccaggagttctttgccgccatgtactacctgctggaagaggaaaaggaaggaaggacgaacgttccagggagtcgtttgaagcttcccagccgagacgtgacagtccttctggaaaactatggcaaattcgaaaaggggtatttgatttttgttgtacgtttcctctttggcctggtaaaccaggagaggacctcctacttggagaagaaattaagttgcaagatctctcagcaaatcaggctggagctgctgaaatggattgaagtgaaagccaaagctaaaaagctgcagatccagcccagccagctggaattgttctactgtttgtacgagatgcaggaggaggacttcgtgcaaagggccatggactatttccccaagattgagatcaatctctccaccagaatggaccacatggtttcttccttttgcattgagaactgtcatcgggtggagtcactgtccctggggtttctccataacatgcccaaggaggaagaggaggaggaaaaggaaggccgacaccttgatatggtgcagtgtgtcctcccaagctcctctcatgctgcctgttctcatggattggtgaacagccacctcacttccagtttttgccggggcctcttttcagttctgagcaccagccagagtctaactgaattggacctcagtgacaattctctgggggacccagggatgagagtgttgtgtgaaacgctccagcatcctggctgtaacattcggagattgtggttggggcgctgtggcctctcgcatgagtgctgcttcgacatctccttggtcctcagcagcaaccagaagctggtggagctggacctgagtgacaacgccctcggtgacttcggaatcagacttctgtgtgtgggactgaagcacctgttgtgcaatctgaagaagctctggttggtcagctgctgcctcacatcagcatgttgtcaggatcttgcatcagtattgagcaccagccattccctgaccagactctatgtgggggagaatgccttgggagactcaggagtcgcaattttatgtgaaaaagccaagaatccacagtgtaacctgcagaaactggggttggtgaattctggccttacgtcagtctgttgttcagctttgtcctcggtactcagcactaatcagaatctcacgcacctttacctgcgaggcaacactctcggagacaaggggatcaaactactctgtgagggactcttgcaccccgactgcaagcttcaggtgttggaattagacaactgcaacctcacgtcacactgctgctgggatctttccacacttctgacctccagccagagcctgcgaaagctgagcctgggcaacaatgacctgggcgacctgggggtcatgatgttctgtgaagtgctgaaacagcagagctgcctcctgcagaacctggggttgtctgaaatgtatttcaattatgagacaaaaagtgcgttagaaacacttcaagaagaaaagcctgagctgaccgtcgtctttgagccttcttggtaggagtggaaacggggctgccagacgccagtgttctccggtccctccagctgggggccctcaggtggagagagctgcgatccatccaggccaagaccacagctctgtgatccttccggtggagtgtcggagaagagagcttgccgacgatgccttcctgtgcagagcttgggcatctcctttacgccagggtgaggaagacaccaggacaatgacagcatcgggtgttgttgtcatcacagcgcctcagttagaggatgttcctcttggtgacctcatgtaattagctcattcaataaagcactttctttatttttctcttctctgtctaactttctttttcctatcttttttcttctttgttctgtttacttttgctcatatcatcattcccgctatctttctattaactgaccataacacagaactagttgactatatattatgttgaaattttatggcagctatttatttatttaaattttttgtaacagttttgttttctaataagaaaaatccatgctttttgtagctggttgaaaattcaggaatatgtaaaactttttggtatttaattaaattgattccttttcttaattttaaaaaaaaaaaaaaa

SEQ ID NO: 3 - DNA, 4128 bp, Homo sapiens
gtagatgaggaaactgaagttgaggaatagtgaagagtttgtccaatgtcatagccccgtaatcaacgggacaaaaattttcttgctgatgggtcaagatggcatcgtgaagtggttgttcaccgtaaactgtaatacaatcctgtttatggatttgtttgcatatttttccctccatagggaaacctttcttccatggctcaggacacactcctggatcgagccaacaggagaactttctggtaagcatttggctaacttttttttttttgagatggagtcttgctgtgtcgcctaggctggagtgcagtggcgtgatcttggctcactgcagcctccacttcccgggttcaatcaattctcctacctcaacttcctgagtagctgggattacaggcgcccgccaccacacccggctcatttttgtacttttagtagagacacagttttgccatgttggccaggctggtcttgaattcctcagctcaggtgatctgcctgccttggcctctcaaagtgctgggattacaggcgtgagccactgtgcccggccttggctaacttttcaaaattaaagattttgacttgttacagtcatgtgacatttttttctttctgtttgctgagtttttgataatttatatctctcaaagtggagactttaaaaaagactcatccgtgtgccgtgttcactgcctggtatcttagtgtggaccgaagcctaaggaccctgaaaacagctgcagatgaagatggcaagcacccgctgcaagctggccaggtacctggaggacctggaggatgtggacttgaagaaatttaagatgcacttagaggactatcctccccagaagggctgcatccccctcccgaggggtcagacagagaaggcagaccatgtggatctagccacgctaatgatcgacttcaatggggaggagaaggcgtgggccatggccgtgtggatcttcgctgcgatcaacaggagagacctttatgagaaagcaaaaagagatgagccgaagtggggttcagataatgcacgtgtttcgaatcccactgtgatatgccaggaagacagcattgaagaggagtggatgggtttactggagtacctttcgagaatctctatttgtaaaatgaagaaagattaccgtaagaagtacagaaagtacgtgagaagcagattccagtgcattgaagacaggaatgcccgtctgggtgagagtgtgagcctcaacaaacgctacacacgactgcgtctcatcaaggagcaccggagccagcaggagagggagcaggagcttctggccatcggcaagaccaagacgtgtgagagccccgtgagtcccattaagatggagttgctgtttgaccccgatgatgagcattctgagcctgtgcacaccgtggtgttccagggggcggcagggattgggaaaacaatcctggccaggaagatgatgttggactgggcgtcggggacactctaccaagacaggtttgactatctgttctatatccactgtcgggaggtgagccttgtgacacagaggagcctgggggacctgatcatgagctgctgccccgacccaaacccacccatccacaagatcgtgagaaaaccctccagaatcctcttcctcatggacggcttcgatgagctgcaaggtgcctttgacgagcacataggaccgctctgcactgactggcagaaggccgagcggggagacattctcctgagcagcctcatcagaaagaagctgcttcccgaggcctctctgctcatcaccacgagacctgtggccctggagaaactgcagcacttgctggaccatcctcggcatgtggagatcctgggtttctccgaggccaaaaggaaagagtacttcttcaagtacttctctgatgaggcccaagccagggcagccttcagtctgattcaggagaacgaggtcctcttcaccatgtgcttcatccccctggtctgctggatcgtgtgcactggactgaaacagcagatggagagtggcaagagccttgcccagacatccaagaccaccaccgcggtgtacgtcttcttcctttccagtttgctgcagccccggggagggagccaggagcacggcctctgcgcccacctctgggggctctgctctttggctgcagatggaatctggaaccagaaaatcctgtttgaggagtccgacctcaggaatcatggactgcagaaggcggatgtgtctgctttcctgaggatgaacctgttccaaaaggaagtggactgcgagaagttctacagcttcatccacatgactttccaggagttctttgccgccatgtactacctgctggaagaggaaaaggaaggaaggacgaacgttccagggagtcgtttgaagcttcccagccgagacgtgacagtccttctggaaaactatggcaaattcgaaaaggggtatttgatttttgttgtacgtttcctctttggcctggtaaaccaggagaggacctcctacttggagaagaaattaagttgcaagatctctcagcaaatcaggctggagctgctgaaatggattgaagtgaaagccaaagctaaaaagctgcagatccagcccagccagctggaattgttctactgtttgtacgagatgcaggaggaggacttcgtgcaaagggccatggactatttccccaagattgagatcaatctctccaccagaatggaccacatggtttcttccttttgcattgagaactgtcatcgggtggagtcactgtccctggggtttctccataacatgcccaaggaggaagaggaggaggaaaaggaaggccgacaccttgatatggtgcagtgtgtcctcccaagctcctctcatgctgcctgttctcatgggttggggcgctgtggcctctcgcatgagtgctgcttcgacatctccttggtcctcagcagcaaccagaagctggtggagctggacctgagtgacaacgccctcggtgacttcggaatcagacttctgtgtgtgggactgaagcacctgttgtgcaatctgaagaagctctggttggtgaattctggccttacgtcagtctgttgttcagctttgtcctcggtactcagcactaatcagaatctcacgcacctttacctgcgaggcaacactctcggagacaaggggatcaaactactctgtgagggactcttgcaccccgactgcaagcttcaggtgttggaattagacaactgcaacctcacgtcacactgctgctgggatctttccacacttctgacctccagccagagcctgcgaaagctgagcctgggcaacaatgacctgggcgacctgggggtcatgatgttctgtgaagtgctgaaacagcagagctgcctcctgcagaacctggggttgtctgaaatgtatttcaattatgagacaaaaagtgcgttagaaacacttcaagaagaaaagcctgagctgaccgtcgtctttgagccttcttggtaggagtggaaacggggctgccagacgccagtgttctccggtccctccagctgggggccctcaggtggagagagctgcgatccatccaggccaagaccacagctctgtgatccttccggtggagtgtcggagaagagagcttgccgacgatgccttcctgtgcagagcttgggcatctcctttacgccagggtgaggaagacaccaggacaatgacagcatcgggtgttgttgtcatcacagcgcctcagttagaggatgttcctcttggtgacctcatgtaattagctcattcaataaagcactttctttatttttctcttctctgtctaactttctttttcctatcttttttcttctttgttctgtttacttttgctcatatcatcattcccgctatctttctattaactgaccataacacagaactagttgactatatattatgttgaaattttatggcagctatttatttatttaaattttttgtaacagttttgttttctaataagaaaaatccatgctttttgtagctggttgaaaattcaggaatatgtaaaactttttggtatttaattaaattgattccttttcttaattttaaaaaaaaaaaaaaa

SEQ ID NO: 4 - DNA, 4333 bp, Homo sapiens
gcatttcctctctagctgttcctgaggctggcatctggatgaggaaactgaagttgaggaatagtgaagagtttgtccaatgtcatagccccgtaatcaacgggacaaaaattttcttgctgatgggtcaagatggcatcgtgaagtggttgttcaccgtaaactgtaatacaatcctgtttatggatttgtttgcatatttttccctccatagggaaacctttcttccatggctcaggacacactcctggatcgagccaacaggagaactttctggtaagcatttggctaacttttttttttttgagatggagtcttgctgtgtcgcctaggctggagtgcagtggcgtgatcttggctcactgcagcctccacttcccgggttcaatcaattctcctacctcaacttcctgagtagctgggattacaggcgcccgccaccacacccggctcatttttgtacttttagtagagacacagttttgccatgttggccaggctggtcttgaattcctcagctcaggtgatctgcctgccttggcctctcaaagtgctgggattacaggcgtgagccactgtgcccggccttggctaacttttcaaaattaaagattttgacttgttacagtcatgtgacatttttttctttctgtttgctgagtttttgataatttatatctctcaaagtggagactttaaaaaagactcatccgtgtgccgtgttcactgcctggtatcttagtgtggaccgaagcctaaggaccctgaaaacagctgcagatgaagatggcaagcacccgctgcaagctggccaggtacctggaggacctggaggatgtggacttgaagaaatttaagatgcacttagaggactatcctccccagaagggctgcatccccctcccgaggggtcagacagagaaggcagaccatgtggatctagccacgctaatgatcgacttcaatggggaggagaaggcgtgggccatggccgtgtggatcttcgctgcgatcaacaggagagacctttatgagaaagcaaaaagagatgagccgaagtggggttcagataatgcacgtgtttcgaatcccactgtgatatgccaggaagacagcattgaagaggagtggatgggtttactggagtacctttcgagaatctctatttgtaaaatgaagaaagattaccgtaagaagtacagaaagtacgtgagaagcagattccagtgcattgaagacaggaatgcccgtctgggtgagagtgtgagcctcaacaaacgctacacacgactgcgtctcatcaaggagcaccggagccagcaggagagggagcaggagcttctggccatcggcaagaccaagacgtgtgagagccccgtgagtcccattaagatggagttgctgtttgaccccgatgatgagcattctgagcctgtgcacaccgtggtgttccagggggcggcagggattgggaaaacaatcctggccaggaagatgatgttggactgggcgtcggggacactctaccaagacaggtttgactatctgttctatatccactgtcgggaggtgagccttgtgacacagaggagcctgggggacctgatcatgagctgctgccccgacccaaacccacccatccacaagatcgtgagaaaaccctccagaatcctcttcctcatggacggcttcgatgagctgcaaggtgcctttgacgagcacataggaccgctctgcactgactggcagaaggccgagcggggagacattctcctgagcagcctcatcagaaagaagctgcttcccgaggcctctctgctcatcaccacgagacctgtggccctggagaaactgcagcacttgctggaccatcctcggcatgtggagatcctgggtttctccgaggccaaaaggaaagagtacttcttcaagtacttctctgatgaggcccaagccagggcagccttcagtctgattcaggagaacgaggtcctcttcaccatgtgcttcatccccctggtctgctggatcgtgtgcactggactgaaacagcagatggagagtggcaagagccttgcccagacatccaagaccaccaccgcggtgtacgtcttcttcctttccagtttgctgcagccccggggagggagccaggagcacggcctctgcgcccacctctgggggctctgctctttggctgcagatggaatctggaaccagaaaatcctgtttgaggagtccgacctcaggaatcatggactgcagaaggcggatgtgtctgctttcctgaggatgaacctgttccaaaaggaagtggactgcgagaagttctacagcttcatccacatgactttccaggagttctttgccgccatgtactacctgctggaagaggaaaaggaaggaaggacgaacgttccagggagtcgtttgaagcttcccagccgagacgtgacagtccttctggaaaactatggcaaattcgaaaaggggtatttgatttttgttgtacgtttcctctttggcctggtaaaccaggagaggacctcctacttggagaagaaattaagttgcaagatctctcagcaaatcaggctggagctgctgaaatggattgaagtgaaagccaaagctaaaaagctgcagatccagcccagccagctggaattgttctactgtttgtacgagatgcaggaggaggacttcgtgcaaagggccatggactatttccccaagattgagatcaatctctccaccagaatggaccacatggtttcttccttttgcattgagaactgtcatcgggtggagtcactgtccctggggtttctccataacatgcccaaggaggaagaggaggaggaaaaggaaggccgacaccttgatatggtgcagtgtgtcctcccaagctcctctcatgctgcctgttctcatggattggtgaacagccacctcacttccagtttttgccggggcctcttttcagttctgagcaccagccagagtctaactgaattggacctcagtgacaattctctgggggacccagggatgagagtgttgtgtgaaacgctccagcatcctggctgtaacattcggagattgtggttggggcgctgtggcctctcgcatgagtgctgcttcgacatctccttggtcctcagcagcaaccagaagctggtggagctggacctgagtgacaacgccctcggtgacttcggaatcagacttctgtgtgtgggactgaagcacctgttgtgcaatctgaagaagctctggttggtgaattctggccttacgtcagtctgttgttcagctttgtcctcggtactcagcactaatcagaatctcacgcacctttacctgcgaggcaacactctcggagacaaggggatcaaactactctgtgagggactcttgcaccccgactgcaagcttcaggtgttggaattagacaactgcaacctcacgtcacactgctgctgggatctttccacacttctgacctccagccagagcctgcgaaagctgagcctgggcaacaatgacctgggcgacctgggggtcatgatgttctgtgaagtgctgaaacagcagagctgcctcctgcagaacctggggttgtctgaaatgtatttcaattatgagacaaaaagtgcgttagaaacacttcaagaagaaaagcctgagctgaccgtcgtctttgagccttcttggtaggagtggaaacggggctgccagacgccagtgttctccggtccctccagctgggggccctcaggtggagagagctgcgatccatccaggccaagaccacagctctgtgatccttccggtggagtgtcggagaagagagcttgccgacgatgccttcctgtgcagagcttgggcatctcctttacgccagggtgaggaagacaccaggacaatgacagcatcgggtgttgttgtcatcacagcgcctcagttagaggatgttcctcttggtgacctcatgtaattagctcattcaataaagcactttctttatttttctcttctctgtctaactttctttttcctatcttttttcttctttgttctgtttacttttgctcatatcatcattcccgctatctttctattaactgaccataacacagaactagttgactatatattatgttgaaattttatggcagctatttatttatttaaattttttgtaacagttttgttttctaataagaaaaatccatgctttttgtagctggttgaaaattcaggaatatgtaaaactttttggtatttaattaaattgattccttttcttaattttaaaaaaaaaaaaaaa

SEQ ID NO: 5 - DNA, 3862 bp, Homo sapiens
gcatttcctctctagctgttcctgaggctggcatctggggaaacctttcttccatggctcaggacacactcctggatcgagccaacaggagaactttctgtgtggaccgaagcctaaggaccctgaaaacagctgcagatgaagatggcaagcacccgctgcaagctggccaggtacctggaggacctggaggatgtggacttgaagaaatttaagatgcacttagaggactatcctccccagaagggctgcatccccctcccgaggggtcagacagagaaggcagaccatgtggatctagccacgctaatgatcgacttcaatggggaggagaaggcgtgggccatggccgtgtggatcttcgctgcgatcaacaggagagacctttatgagaaagcaaaaagagatgagccgaagtggggttcagataatgcacgtgtttcgaatcccactgtgatatgccaggaagacagcattgaagaggagtggatgggtttactggagtacctttcgagaatctctatttgtaaaatgaagaaagattaccgtaagaagtacagaaagtacgtgagaagcagattccagtgcattgaagacaggaatgcccgtctgggtgagagtgtgagcctcaacaaacgctacacacgactgcgtctcatcaaggagcaccggagccagcaggagagggagcaggagcttctggccatcggcaagaccaagacgtgtgagagccccgtgagtcccattaagatggagttgctgtttgaccccgatgatgagcattctgagcctgtgcacaccgtggtgttccagggggcggcagggattgggaaaacaatcctggccaggaagatgatgttggactgggcgtcggggacactctaccaagacaggtttgactatctgttctatatccactgtcgggaggtgagccttgtgacacagaggagcctgggggacctgatcatgagctgctgccccgacccaaacccacccatccacaagatcgtgagaaaaccctccagaatcctcttcctcatggacggcttcgatgagctgcaaggtgcctttgacgagcacataggaccgctctgcactgactggcagaaggccgagcggggagacattctcctgagcagcctcatcagaaagaagctgcttcccgaggcctctctgctcatcaccacgagacctgtggccctggagaaactgcagcacttgctggaccatcctcggcatgtggagatcctgggtttctccgaggccaaaaggaaagagtacttcttcaagtacttctctgatgaggcccaagccagggcagccttcagtctgattcaggagaacgaggtcctcttcaccatgtgcttcatccccctggtctgctggatcgtgtgcactggactgaaacagcagatggagagtggcaagagccttgcccagacatccaagaccaccaccgcggtgtacgtcttcttcctttccagtttgctgcagccccggggagggagccaggagcacggcctctgcgcccacctctgggggctctgctctttggctgcagatggaatctggaaccagaaaatcctgtttgaggagtccgacctcaggaatcatggactgcagaaggcggatgtgtctgctttcctgaggatgaacctgttccaaaaggaagtggactgcgagaagttctacagcttcatccacatgactttccaggagttctttgccgccatgtactacctgctggaagaggaaaaggaaggaaggacgaacgttccagggagtcgtttgaagcttcccagccgagacgtgacagtccttctggaaaactatggcaaattcgaaaaggggtatttgatttttgttgtacgtttcctctttggcctggtaaaccaggagaggacctcctacttggagaagaaattaagttgcaagatctctcagcaaatcaggctggagctgctgaaatggattgaagtgaaagccaaagctaaaaagctgcagatccagcccagccagctggaattgttctactgtttgtacgagatgcaggaggaggacttcgtgcaaagggccatggactatttccccaagattgagatcaatctctccaccagaatggaccacatggtttcttccttttgcattgagaactgtcatcgggtggagtcactgtccctggggtttctccataacatgcccaaggaggaagaggaggaggaaaaggaaggccgacaccttgatatggtgcagtgtgtcctcccaagctcctctcatgctgcctgttctcatggattggtgaacagccacctcacttccagtttttgccggggcctcttttcagttctgagcaccagccagagtctaactgaattggacctcagtgacaattctctgggggacccagggatgagagtgttgtgtgaaacgctccagcatcctggctgtaacattcggagattgtggttggggcgctgtggcctctcgcatgagtgctgcttcgacatctccttggtcctcagcagcaaccagaagctggtggagctggacctgagtgacaacgccctcggtgacttcggaatcagacttctgtgtgtgggactgaagcacctgttgtgcaatctgaagaagctctggttggtcagctgctgcctcacatcagcatgttgtcaggatcttgcatcagtattgagcaccagccattccctgaccagactctatgtgggggagaatgccttgggagactcaggagtcgcaattttatgtgaaaaagccaagaatccacagtgtaacctgcagaaactggggttggtgaattctggccttacgtcagtctgttgttcagctttgtcctcggtactcagcactaatcagaatctcacgcacctttacctgcgaggcaacactctcggagacaaggggatcaaactactctgtgagggactcttgcaccccgactgcaagcttcaggtgttggaattagacaactgcaacctcacgtcacactgctgctgggatctttccacacttctgacctccagccagagcctgcgaaagctgagcctgggcaacaatgacctgggcgacctgggggtcatgatgttctgtgaagtgctgaaacagcagagctgcctcctgcagaacctggggttgtctgaaatgtatttcaattatgagacaaaaagtgcgttagaaacacttcaagaagaaaagcctgagctgaccgtcgtctttgagccttcttggtaggagtggaaacggggctgccagacgccagtgttctccggtccctccagctgggggccctcaggtggagagagctgcgatccatccaggccaagaccacagctctgtgatccttccggtggagtgtcggagaagagagcttgccgacgatgccttcctgtgcagagcttgggcatctcctttacgccagggtgaggaagacaccaggacaatgacagcatcgggtgttgttgtcatcacagcgcctcagttagaggatgttcctcttggtgacctcatgtaattagctcattcaataaagcactttctttatttttctcttctctgtctaactttctttttcctatcttttttcttctttgttctgtttacttttgctcatatcatcattcccgctatctttctattaactgaccataacacagaactagttgactatatattatgttgaaattttatggcagctatttatttatttaaattttttgtaacagttttgttttctaataagaaaaatccatgctttttgtagctggttgaaaattcaggaatatgtaaaactttttggtatttaattaaattgattccttttcttaattttaaaaaaaaaaaaaaa

SEQ ID NO: 6-9 - skipped (4 entries)

SEQ ID NO: 10 - DNA, 23 bp, Artificial sequence
  Primer
gatgttctgtgaagtgctgaaac

SEQ ID NO: 11 - DNA, 21 bp, Artificial sequence
  Primer
agctcaggcttttcttcttga

SEQ ID NO: 12 - DNA, 20 bp, Artificial sequence
  Probe
accccaggttctgcaggagg

SEQ ID NO: 13 - DNA, 20 bp, Artificial sequence
  Primer
ggcaaattcaacggcacagt

SEQ ID NO: 14 - DNA, 20 bp, Artificial sequence
  Primer
gggtctcgctcctggaagat

SEQ ID NO: 15 - DNA, 27 bp, Artificial sequence
  Probe
aaggccgagaatgggaagcttgtcatc

SEQ ID NO: 16-19 - skipped (4 entries)

SEQ ID NO: 20 - DNA, 16 bp, Artificial sequence
  Synthetic oligonucleotide
ggctatgacattggac

SEQ ID NO: 21 - DNA, 16 bp, Artificial sequence
  Synthetic oligonucleotide
atcttgacccatcagc

SEQ ID NO: 22 - DNA, 16 bp, Artificial sequence
  Synthetic oligonucleotide
atgccatcttgaccca

SEQ ID NO: 23 - DNA, 16 bp, Artificial sequence
  Synthetic oligonucleotide
acggtgaacaaccact

SEQ ID NO: 24 - DNA, 16 bp, Artificial sequence
  Synthetic oligonucleotide
ttacagtttacggtga

SEQ ID NO: 25 - DNA, 16 bp, Artificial sequence
  Synthetic oligonucleotide
cgatccaggagtgtgt

SEQ ID NO: 26 - DNA, 16 bp, Artificial sequence
  Synthetic oligonucleotide
aagttagccaaggccg

SEQ ID NO: 27 - DNA, 16 bp, Artificial sequence
  Synthetic oligonucleotide
ccttaggcttcggtcc

SEQ ID NO: 28 - DNA, 16 bp, Artificial sequence
  Synthetic oligonucleotide
ccccattgaagtcgat

SEQ ID NO: 29 - DNA, 16 bp, Artificial sequence
  Synthetic oligonucleotide
atcgcagcgaagatcc

SEQ ID NO: 30 - DNA, 16 bp, Artificial sequence
  Synthetic oligonucleotide
tcacagtgggattcga

SEQ ID NO: 31 - DNA, 16 bp, Artificial sequence
  Synthetic oligonucleotide
tctcgaaaggtactcc

SEQ ID NO: 32 - DNA, 16 bp, Artificial sequence
  Synthetic oligonucleotide
cttgatgagacgcagt

SEQ ID NO: 33 - DNA, 16 bp, Artificial sequence
  Synthetic oligonucleotide
cgtcaaaggcaccttg

SEQ ID NO: 34 - DNA, 16 bp, Artificial sequence
  Synthetic oligonucleotide
gaacaggttcatcctc

SEQ ID NO: 35 - DNA, 16 bp, Artificial sequence
  Synthetic oligonucleotide
ccagaaggactgtcac

SEQ ID NO: 36 - DNA, 16 bp, Artificial sequence
  Synthetic oligonucleotide
aataccccttttcgaa

SEQ ID NO: 37 - DNA, 16 bp, Artificial sequence
  Synthetic oligonucleotide
gggaaatagtccatgg

SEQ ID NO: 38 - DNA, 16 bp, Artificial sequence
  Synthetic oligonucleotide
caccatatcaaggtgt

SEQ ID NO: 39 - DNA, 16 bp, Artificial sequence
  Synthetic oligonucleotide
tgaaaagaggccccgg

SEQ ID NO: 40 - DNA, 16 bp, Artificial sequence
  Synthetic oligonucleotide
ctccgaatgttacagc

SEQ ID NO: 41 - DNA, 16 bp, Artificial sequence
  Synthetic oligonucleotide
ctcatgcgagaggcca

SEQ ID NO: 42 - DNA, 16 bp, Artificial sequence
  Synthetic oligonucleotide
accaaggagatgtcga

SEQ ID NO: 43 - DNA, 16 bp, Artificial sequence
  Synthetic oligonucleotide
ctgattccgaagtcac

SEQ ID NO: 44 - DNA, 16 bp, Artificial sequence
  Synthetic oligonucleotide
aattgcgactcctgag

SEQ ID NO: 45 - DNA, 16 bp, Artificial sequence
  Synthetic oligonucleotide
tcacataaaattgcga

SEQ ID NO: 46 - DNA, 16 bp, Artificial sequence
  Synthetic oligonucleotide
tcgcaggtaaaggtgc

SEQ ID NO: 47 - DNA, 16 bp, Artificial sequence
  Synthetic oligonucleotide
tttctaacgcactttt

SEQ ID NO: 48 - DNA, 16 bp, Artificial sequence
  Synthetic oligonucleotide
tcaaagacgacggtca

SEQ ID NO: 49 - DNA, 16 bp, Artificial sequence
  Synthetic oligonucleotide
agggaccggagaacac

SEQ ID NO: 50 - DNA, 16 bp, Artificial sequence
  Synthetic oligonucleotide
cgtaaaggagatgccc

SEQ ID NO: 51 - DNA, 16 bp, Artificial sequence
  Synthetic oligonucleotide
aatgatgatatgagca

SEQ ID NO: 52 - DNA, 16 bp, Artificial sequence
  Synthetic oligonucleotide
aagatagcgggaatga

SEQ ID NO: 53 - DNA, 16 bp, Artificial sequence
  Synthetic oligonucleotide
cgcataccctcccagc

SEQ ID NO: 54 - DNA, 16 bp, Artificial sequence
  Synthetic oligonucleotide
tattagctccgcatac

SEQ ID NO: 55 - DNA, 16 bp, Artificial sequence
  Synthetic oligonucleotide
aaacggtggagctctc

SEQ ID NO: 56 - DNA, 16 bp, Artificial sequence
  Synthetic oligonucleotide
caaaattcgcaattgt

SEQ ID NO: 57 - DNA, 16 bp, Artificial sequence
  Synthetic oligonucleotide
agtagtaagattcaca

SEQ ID NO: 58 - DNA, 16 bp, Artificial sequence
  Synthetic oligonucleotide
caaaacatgtggtctg

SEQ ID NO: 59 - DNA, 16 bp, Artificial sequence
  Synthetic oligonucleotide
taaaccatgggccagt

SEQ ID NO: 60 - DNA, 16 bp, Artificial sequence
  Synthetic oligonucleotide
atccaaacagtcacta

SEQ ID NO: 61 - DNA, 16 bp, Artificial sequence
  Synthetic oligonucleotide
atgcaattgaaacctg

SEQ ID NO: 62 - DNA, 16 bp, Artificial sequence
  Synthetic oligonucleotide
gtaaccggaatggaga

SEQ ID NO: 63 - DNA, 16 bp, Artificial sequence
  Synthetic oligonucleotide
gcattatgatgtagct

SEQ ID NO: 64 - DNA, 16 bp, Artificial sequence
  Synthetic oligonucleotide
tccttaaaggaggctt

SEQ ID NO: 65 - DNA, 16 bp, Artificial sequence
  Synthetic oligonucleotide
ctcttaatgagtagtt

SEQ ID NO: 66 - DNA, 16 bp, Artificial sequence
  Synthetic oligonucleotide
aaatcgcaagcccagg

SEQ ID NO: 67 - DNA, 16 bp, Artificial sequence
  Synthetic oligonucleotide
taacattaggtcttgt

SEQ ID NO: 68 - DNA, 16 bp, Artificial sequence
  Synthetic oligonucleotide
gaatatatcgagcatc

SEQ ID NO: 69 - DNA, 16 bp, Artificial sequence
  Synthetic oligonucleotide
caaacgcaaaccccat

SEQ ID NO: 70 - DNA, 16 bp, Artificial sequence
  Synthetic oligonucleotide
gcacaatcgaatcaga

SEQ ID NO: 71 - DNA, 16 bp, Artificial sequence
  Synthetic oligonucleotide
aactactcgaagaatt

SEQ ID NO: 72 - DNA, 16 bp, Artificial sequence
  Synthetic oligonucleotide
ctatactttatccctg

SEQ ID NO: 73 - DNA, 16 bp, Artificial sequence
  Synthetic oligonucleotide
gaccagagagctccgg

SEQ ID NO: 74 - DNA, 16 bp, Artificial sequence
  Synthetic oligonucleotide
gagctccggaatagag

SEQ ID NO: 75 - DNA, 16 bp, Artificial sequence
  Synthetic oligonucleotide
tcctataaggacaatc

SEQ ID NO: 76 - DNA, 16 bp, Artificial sequence
  Synthetic oligonucleotide
atcttattagcagcag

SEQ ID NO: 77 - DNA, 16 bp, Artificial sequence
  Synthetic oligonucleotide
cctagtgtagaggctg

SEQ ID NO: 78 - DNA, 16 bp, Artificial sequence
  Synthetic oligonucleotide
catgattattagtggg

SEQ ID NO: 79 - DNA, 16 bp, Artificial sequence
  Synthetic oligonucleotide
aaagctaaattggagg

SEQ ID NO: 80 - DNA, 16 bp, Artificial sequence
  Synthetic oligonucleotide
ttctaaggcgatttgc

SEQ ID NO: 81 - DNA, 16 bp, Artificial sequence
  Synthetic oligonucleotide
gacctataaggaccca

SEQ ID NO: 82 - DNA, 16 bp, Artificial sequence
  Synthetic oligonucleotide
aatcacataggtcttc

SEQ ID NO: 83 - DNA, 16 bp, Artificial sequence
  Synthetic oligonucleotide
tttcaatagatagggt

SEQ ID NO: 84 - DNA, 16 bp, Artificial sequence
  Synthetic oligonucleotide
atagatacctatctca

SEQ ID NO: 85 - DNA, 16 bp, Artificial sequence
  Synthetic oligonucleotide
atgcataaaagtctcg

SEQ ID NO: 86 - DNA, 16 bp, Artificial sequence
  Synthetic oligonucleotide
aacccataggctatac

SEQ ID NO: 87 - DNA, 16 bp, Artificial sequence
  Synthetic oligonucleotide
atttaggaccgtcccc

SEQ ID NO: 88 - DNA, 16 bp, Artificial sequence
  Synthetic oligonucleotide
aactaattcatagctg

SEQ ID NO: 89 - DNA, 16 bp, Artificial sequence
  Synthetic oligonucleotide
aatccttggattagag

SEQ ID NO: 90 - DNA, 16 bp, Artificial sequence
  Synthetic oligonucleotide
taactattaagcaacg

SEQ ID NO: 91 - DNA, 16 bp, Artificial sequence
  Synthetic oligonucleotide
caggaatagcgcaggt

SEQ ID NO: 92 - DNA, 16 bp, Artificial sequence
  Synthetic oligonucleotide
atctatatcatctgga

SEQ ID NO: 93 - DNA, 16 bp, Artificial sequence
  Synthetic oligonucleotide
tgcaaatgaagcgaga

SEQ ID NO: 94 - DNA, 16 bp, Artificial sequence
  Synthetic oligonucleotide
ccatagacgagttcta

SEQ ID NO: 95 - DNA, 16 bp, Artificial sequence
  Synthetic oligonucleotide
tcattaatatggacag

SEQ ID NO: 96 - DNA, 16 bp, Artificial sequence
  Synthetic oligonucleotide
aggaagaggactctcg

SEQ ID NO: 97 - DNA, 16 bp, Artificial sequence
  Synthetic oligonucleotide
ccctaatgtacggtac

SEQ ID NO: 98 - DNA, 16 bp, Artificial sequence
  Synthetic oligonucleotide
tcccgttgattacggg

SEQ ID NO: 99 - DNA, 16 bp, Artificial sequence
  Synthetic oligonucleotide
ccatcttgacccatca

SEQ ID NO: 100 - DNA, 16 bp, Artificial sequence
  Synthetic oligonucleotide
tacggtgaacaaccac

SEQ ID NO: 101 - DNA, 16 bp, Artificial sequence
  Synthetic oligonucleotide
tattacagtttacggt

SEQ ID NO: 102 - DNA, 16 bp, Artificial sequence
  Synthetic oligonucleotide
ctcgatccaggagtgt

SEQ ID NO: 103 - DNA, 16 bp, Artificial sequence
  Synthetic oligonucleotide
cacggatgagtctttt

SEQ ID NO: 104 - DNA, 16 bp, Artificial sequence
  Synthetic oligonucleotide
gtccttaggcttcggt

SEQ ID NO: 105 - DNA, 16 bp, Artificial sequence
  Synthetic oligonucleotide
atccacacggccatgg

SEQ ID NO: 106 - DNA, 16 bp, Artificial sequence
  Synthetic oligonucleotide
gatcgcagcgaagatc

SEQ ID NO: 107 - DNA, 16 bp, Artificial sequence
  Synthetic oligonucleotide
ggcatatcacagtggg

SEQ ID NO: 108 - DNA, 16 bp, Artificial sequence
  Synthetic oligonucleotide
attctcgaaaggtact

SEQ ID NO: 109 - DNA, 16 bp, Artificial sequence
  Synthetic oligonucleotide
ttaatgggactcacgg

SEQ ID NO: 110 - DNA, 16 bp, Artificial sequence
  Synthetic oligonucleotide
gctcaggagaatgtct

SEQ ID NO: 111 - DNA, 16 bp, Artificial sequence
  Synthetic oligonucleotide
aggtagtacatggcgg

SEQ ID NO: 112 - DNA, 16 bp, Artificial sequence
  Synthetic oligonucleotide
gaatttgccatagttt

SEQ ID NO: 113 - DNA, 16 bp, Artificial sequence
  Synthetic oligonucleotide
aagtaggaggtcctct

SEQ ID NO: 114 - DNA, 16 bp, Artificial sequence
  Synthetic oligonucleotide
agagattgatctcaat

SEQ ID NO: 115 - DNA, 16 bp, Artificial sequence
  Synthetic oligonucleotide
cccggcaaaaactgga

SEQ ID NO: 116 - DNA, 16 bp, Artificial sequence
  Synthetic oligonucleotide
ctgaaaagaggccccg

SEQ ID NO: 117 - DNA, 16 bp, Artificial sequence
  Synthetic oligonucleotide
tctccgaatgttacag

SEQ ID NO: 118 - DNA, 16 bp, Artificial sequence
  Synthetic oligonucleotide
actcatgcgagaggcc

SEQ ID NO: 119 - DNA, 16 bp, Artificial sequence
  Synthetic oligonucleotide
gaccaaggagatgtcg

SEQ ID NO: 120 - DNA, 16 bp, Artificial sequence
  Synthetic oligonucleotide
cacaacaggtgcttca

SEQ ID NO: 121 - DNA, 16 bp, Artificial sequence
  Synthetic oligonucleotide
aaattgcgactcctga

SEQ ID NO: 122 - DNA, 16 bp, Artificial sequence
  Synthetic oligonucleotide
ggccagaattcaccaa

SEQ ID NO: 123 - DNA, 16 bp, Artificial sequence
  Synthetic oligonucleotide
tccgagagtgttgcct

SEQ ID NO: 124 - DNA, 16 bp, Artificial sequence
  Synthetic oligonucleotide
gtttctaacgcacttt

SEQ ID NO: 125 - DNA, 16 bp, Artificial sequence
  Synthetic oligonucleotide
ctcaaagacgacggtc

SEQ ID NO: 126 - DNA, 16 bp, Artificial sequence
  Synthetic oligonucleotide
ctggagggaccggaga

SEQ ID NO: 127 - DNA, 16 bp, Artificial sequence
  Synthetic oligonucleotide
acccgatgctgtcatt

SEQ ID NO: 128 - DNA, 16 bp, Artificial sequence
  Synthetic oligonucleotide
gaatgatgatatgagc

SEQ ID NO: 129 - DNA, 16 bp, Artificial sequence
  Synthetic oligonucleotide
aaagatagcgggaatg

SEQ ID NO: 130 - DNA, 16 bp, Artificial sequence
  Synthetic oligonucleotide
ccgcataccctcccag

SEQ ID NO: 131 - DNA, 16 bp, Artificial sequence
  Synthetic oligonucleotide
ctattagctccgcata

SEQ ID NO: 132 - DNA, 16 bp, Artificial sequence
  Synthetic oligonucleotide
aaaacggtggagctct

SEQ ID NO: 133 - DNA, 16 bp, Artificial sequence
  Synthetic oligonucleotide
ttattacggccgggcg

SEQ ID NO: 134 - DNA, 16 bp, Artificial sequence
  Synthetic oligonucleotide
gagtagtaagattcac

SEQ ID NO: 135 - DNA, 16 bp, Artificial sequence
  Synthetic oligonucleotide
aaagaaccttatcccc

SEQ ID NO: 136 - DNA, 16 bp, Artificial sequence
  Synthetic oligonucleotide
aaagacggtgtagtgg

SEQ ID NO: 137 - DNA, 16 bp, Artificial sequence
  Synthetic oligonucleotide
catactaaaagctccc

SEQ ID NO: 138 - DNA, 16 bp, Artificial sequence
  Synthetic oligonucleotide
ctattatcacagagga

SEQ ID NO: 139 - DNA, 16 bp, Artificial sequence
  Synthetic oligonucleotide
ggtaaccggaatggag

SEQ ID NO: 140 - DNA, 16 bp, Artificial sequence
  Synthetic oligonucleotide
ccatacatcaatcttt

SEQ ID NO: 141 - DNA, 16 bp, Artificial sequence
  Synthetic oligonucleotide
gtagaaaccgtaccct

SEQ ID NO: 142 - DNA, 16 bp, Artificial sequence
  Synthetic oligonucleotide
cataaggtctccctgc

SEQ ID NO: 143 - DNA, 16 bp, Artificial sequence
  Synthetic oligonucleotide
aaaatcgcaagcccag

SEQ ID NO: 144 - DNA, 16 bp, Artificial sequence
  Synthetic oligonucleotide
gattaacattaggtct

SEQ ID NO: 145 - DNA, 16 bp, Artificial sequence
  Synthetic oligonucleotide
atggaatatatcgagc

SEQ ID NO: 146 - DNA, 16 bp, Artificial sequence
  Synthetic oligonucleotide
acaaacgcaaacccca

SEQ ID NO: 147 - DNA, 16 bp, Artificial sequence
  Synthetic oligonucleotide
agccaccgaacagcac

SEQ ID NO: 148 - DNA, 16 bp, Artificial sequence
  Synthetic oligonucleotide
acaaagggtaacatcc

SEQ ID NO: 149 - DNA, 16 bp, Artificial sequence
  Synthetic oligonucleotide
aactatactttatccc

SEQ ID NO: 150 - DNA, 16 bp, Artificial sequence
  Synthetic oligonucleotide
tgaccagagagctccg

SEQ ID NO: 151 - DNA, 16 bp, Artificial sequence
  Synthetic oligonucleotide
aatatgaggacccagg

SEQ ID NO: 152 - DNA, 16 bp, Artificial sequence
  Synthetic oligonucleotide
attaatggccttaagc

SEQ ID NO: 153 - DNA, 16 bp, Artificial sequence
  Synthetic oligonucleotide
acactaagaaactcta

SEQ ID NO: 154 - DNA, 16 bp, Artificial sequence
  Synthetic oligonucleotide
tcctagtgtagaggct

SEQ ID NO: 155 - DNA, 16 bp, Artificial sequence
  Synthetic oligonucleotide
ccctatagcatctttc

SEQ ID NO: 156 - DNA, 16 bp, Artificial sequence
  Synthetic oligonucleotide
aatgaagacctatcca

SEQ ID NO: 157 - DNA, 16 bp, Artificial sequence
  Synthetic oligonucleotide
atattctaaggcgatt

SEQ ID NO: 158 - DNA, 16 bp, Artificial sequence
  Synthetic oligonucleotide
aaagtaaggactggga

SEQ ID NO: 159 - DNA, 16 bp, Artificial sequence
  Synthetic oligonucleotide
atcttaatctcacact

SEQ ID NO: 160 - DNA, 16 bp, Artificial sequence
  Synthetic oligonucleotide
cgatagatctacacaa

SEQ ID NO: 161 - DNA, 16 bp, Artificial sequence
  Synthetic oligonucleotide
tatagatacctatctc

SEQ ID NO: 162 - DNA, 16 bp, Artificial sequence
  Synthetic oligonucleotide
ggctatacctaacaca

SEQ ID NO: 163 - DNA, 16 bp, Artificial sequence
  Synthetic oligonucleotide
taacccataggctata

SEQ ID NO: 164 - DNA, 16 bp, Artificial sequence
  Synthetic oligonucleotide
catttaggaccgtccc

SEQ ID NO: 165 - DNA, 16 bp, Artificial sequence
  Synthetic oligonucleotide
ttattaactacctgcc

SEQ ID NO: 166 - DNA, 16 bp, Artificial sequence
  Synthetic oligonucleotide
aaacaaccatgtccca

SEQ ID NO: 167 - DNA, 16 bp, Artificial sequence
  Synthetic oligonucleotide
aaattgcaacagacgg

SEQ ID NO: 168 - DNA, 16 bp, Artificial sequence
  Synthetic oligonucleotide
gtcaaattaagcccat

SEQ ID NO: 169 - DNA, 16 bp, Artificial sequence
  Synthetic oligonucleotide
actaactagcttcaag

SEQ ID NO: 170 - DNA, 16 bp, Artificial sequence
  Synthetic oligonucleotide
aacctaatcttgagtg

SEQ ID NO: 171 - DNA, 16 bp, Artificial sequence
  Synthetic oligonucleotide
caatttggatgaccca

SEQ ID NO: 172 - DNA, 16 bp, Artificial sequence
  Synthetic oligonucleotide
gatcattaatatggac

SEQ ID NO: 173 - DNA, 16 bp, Artificial sequence
  Synthetic oligonucleotide
caggagagatatcaga

SEQ ID NO: 174 - DNA, 16 bp, Artificial sequence
  Synthetic oligonucleotide
aacccctaatgtacgg

SEQ ID NO: 175 - DNA, 16 bp, Artificial sequence
  Synthetic oligonucleotide
atttttgtcccgttga

SEQ ID NO: 176 - DNA, 16 bp, Artificial sequence
  Synthetic oligonucleotide
cacgatgccatcttga

SEQ ID NO: 177 - DNA, 16 bp, Artificial sequence
  Synthetic oligonucleotide
ttacggtgaacaacca

SEQ ID NO: 178 - DNA, 16 bp, Artificial sequence
  Synthetic oligonucleotide
gtattacagtttacgg

SEQ ID NO: 179 - DNA, 16 bp, Artificial sequence
  Synthetic oligonucleotide
ttaccagaaagttctc

SEQ ID NO: 180 - DNA, 16 bp, Artificial sequence
  Synthetic oligonucleotide
acacggatgagtcttt

SEQ ID NO: 181 - DNA, 16 bp, Artificial sequence
  Synthetic oligonucleotide
ttgcagcgggtgcttg

SEQ ID NO: 182 - DNA, 16 bp, Artificial sequence
  Synthetic oligonucleotide
gcgaagatccacacgg

SEQ ID NO: 183 - DNA, 16 bp, Artificial sequence
  Synthetic oligonucleotide
cataaaggtctctcct

SEQ ID NO: 184 - DNA, 16 bp, Artificial sequence
  Synthetic oligonucleotide
cagtaaacccatccac

SEQ ID NO: 185 - DNA, 16 bp, Artificial sequence
  Synthetic oligonucleotide
gattctcgaaaggtac

SEQ ID NO: 186 - DNA, 16 bp, Artificial sequence
  Synthetic oligonucleotide
cttaatgggactcacg

SEQ ID NO: 187 - DNA, 16 bp, Artificial sequence
  Synthetic oligonucleotide
gccgaggatggtccag

SEQ ID NO: 188 - DNA, 16 bp, Artificial sequence
  Synthetic oligonucleotide
aaacgactccctggaa

SEQ ID NO: 189 - DNA, 16 bp, Artificial sequence
  Synthetic oligonucleotide
ttcgaatttgccatag

SEQ ID NO: 190 - DNA, 16 bp, Artificial sequence
  Synthetic oligonucleotide
caagtaggaggtcctc

SEQ ID NO: 191 - DNA, 16 bp, Artificial sequence
  Synthetic oligonucleotide
gtggagagattgatct

SEQ ID NO: 192 - DNA, 16 bp, Artificial sequence
  Synthetic oligonucleotide
ccccggcaaaaactgg

SEQ ID NO: 193 - DNA, 16 bp, Artificial sequence
  Synthetic oligonucleotide
caattcagttagactc

SEQ ID NO: 194 - DNA, 16 bp, Artificial sequence
  Synthetic oligonucleotide
atctccgaatgttaca

SEQ ID NO: 195 - DNA, 16 bp, Artificial sequence
  Synthetic oligonucleotide
tcgaagcagcactcat

SEQ ID NO: 196 - DNA, 16 bp, Artificial sequence
  Synthetic oligonucleotide
ccgaagtcaccgaggg

SEQ ID NO: 197 - DNA, 16 bp, Artificial sequence
  Synthetic oligonucleotide
cttcagattgcacaac

SEQ ID NO: 198 - DNA, 16 bp, Artificial sequence
  Synthetic oligonucleotide
aaaattgcgactcctg

SEQ ID NO: 199 - DNA, 16 bp, Artificial sequence
  Synthetic oligonucleotide
cgtaaggccagaattc

SEQ ID NO: 200 - DNA, 16 bp, Artificial sequence
  Synthetic oligonucleotide
ctccgagagtgttgcc

SEQ ID NO: 201 - DNA, 16 bp, Artificial sequence
  Synthetic oligonucleotide
acgacggtcagctcag

SEQ ID NO: 202 - DNA, 16 bp, Artificial sequence
  Synthetic oligonucleotide
gctcaaagacgacggt

SEQ ID NO: 203 - DNA, 16 bp, Artificial sequence
  Synthetic oligonucleotide
atggatcgcagctctc

SEQ ID NO: 204 - DNA, 16 bp, Artificial sequence
  Synthetic oligonucleotide
cacccgatgctgtcat

SEQ ID NO: 205 - DNA, 16 bp, Artificial sequence
  Synthetic oligonucleotide
cgggaatgatgatatg

SEQ ID NO: 206 - DNA, 16 bp, Artificial sequence
  Synthetic oligonucleotide
gaaagatagcgggaat

SEQ ID NO: 207 - DNA, 16 bp, Artificial sequence
  Synthetic oligonucleotide
ctccgcataccctccc

SEQ ID NO: 208 - DNA, 16 bp, Artificial sequence
  Synthetic oligonucleotide
cctattagctccgcat

SEQ ID NO: 209 - DNA, 16 bp, Artificial sequence
  Synthetic oligonucleotide
tggaaaacggtggagc

SEQ ID NO: 210 - DNA, 16 bp, Artificial sequence
  Synthetic oligonucleotide
attattacggccgggc

SEQ ID NO: 211 - DNA, 16 bp, Artificial sequence
  Synthetic oligonucleotide
acatagttgaacccgg

SEQ ID NO: 212 - DNA, 16 bp, Artificial sequence
  Synthetic oligonucleotide
tataagtactgacaca

SEQ ID NO: 213 - DNA, 16 bp, Artificial sequence
  Synthetic oligonucleotide
caaagacggtgtagtg

SEQ ID NO: 214 - DNA, 16 bp, Artificial sequence
  Synthetic oligonucleotide
caagagtgagaacgac

SEQ ID NO: 215 - DNA, 16 bp, Artificial sequence
  Synthetic oligonucleotide
acctatagtatggcca

SEQ ID NO: 216 - DNA, 16 bp, Artificial sequence
  Synthetic oligonucleotide
cggaagcgagtggtaa

SEQ ID NO: 217 - DNA, 16 bp, Artificial sequence
  Synthetic oligonucleotide
taccatacatcaatct

SEQ ID NO: 218 - DNA, 16 bp, Artificial sequence
  Synthetic oligonucleotide
ctgccgtagaaaccgt

SEQ ID NO: 219 - DNA, 16 bp, Artificial sequence
  Synthetic oligonucleotide
tgctatctagagaaat

SEQ ID NO: 220 - DNA, 16 bp, Artificial sequence
  Synthetic oligonucleotide
gaaaatcgcaagccca

SEQ ID NO: 221 - DNA, 16 bp, Artificial sequence
  Synthetic oligonucleotide
gactagattaacatta

SEQ ID NO: 222 - DNA, 16 bp, Artificial sequence
  Synthetic oligonucleotide
aatggaatatatcgag

SEQ ID NO: 223 - DNA, 16 bp, Artificial sequence
  Synthetic oligonucleotide
aacaaacgcaaacccc

SEQ ID NO: 224 - DNA, 16 bp, Artificial sequence
  Synthetic oligonucleotide
catttaagccaccgaa

SEQ ID NO: 225 - DNA, 16 bp, Artificial sequence
  Synthetic oligonucleotide
acgatttgaaatttac

SEQ ID NO: 226 - DNA, 16 bp, Artificial sequence
  Synthetic oligonucleotide
ccgtaaacagtgccgg

SEQ ID NO: 227 - DNA, 16 bp, Artificial sequence
  Synthetic oligonucleotide
gaatacacctgaccag

SEQ ID NO: 228 - DNA, 16 bp, Artificial sequence
  Synthetic oligonucleotide
tacaatatgaggaccc

SEQ ID NO: 229 - DNA, 16 bp, Artificial sequence
  Synthetic oligonucleotide
aacaagtaagcattct

SEQ ID NO: 230 - DNA, 16 bp, Artificial sequence
  Synthetic oligonucleotide
atgcgataacttgcat

SEQ ID NO: 231 - DNA, 16 bp, Artificial sequence
  Synthetic oligonucleotide
ctacataggtgaaggt

SEQ ID NO: 232 - DNA, 16 bp, Artificial sequence
  Synthetic oligonucleotide
accctatagcatcttt

SEQ ID NO: 233 - DNA, 16 bp, Artificial sequence
  Synthetic oligonucleotide
gattagtggattactc

SEQ ID NO: 234 - DNA, 16 bp, Artificial sequence
  Synthetic oligonucleotide
aatattctaaggcgat

SEQ ID NO: 235 - DNA, 16 bp, Artificial sequence
  Synthetic oligonucleotide
tcaactaaagtaagga

SEQ ID NO: 236 - DNA, 16 bp, Artificial sequence
  Synthetic oligonucleotide
gaaacttgggacatgg

SEQ ID NO: 237 - DNA, 16 bp, Artificial sequence
  Synthetic oligonucleotide
atcgatagatctacac

SEQ ID NO: 238 - DNA, 16 bp, Artificial sequence
  Synthetic oligonucleotide
cttatagatacctatc

SEQ ID NO: 239 - DNA, 16 bp, Artificial sequence
  Synthetic oligonucleotide
taggctatacctaaca

SEQ ID NO: 240 - DNA, 16 bp, Artificial sequence
  Synthetic oligonucleotide
ctaacccataggctat

SEQ ID NO: 241 - DNA, 16 bp, Artificial sequence
  Synthetic oligonucleotide
gcatttaggaccgtcc

SEQ ID NO: 242 - DNA, 16 bp, Artificial sequence
  Synthetic oligonucleotide
aagttaattggttggg

SEQ ID NO: 243 - DNA, 16 bp, Artificial sequence
  Synthetic oligonucleotide
aagcaacggttacact

SEQ ID NO: 244 - DNA, 16 bp, Artificial sequence
  Synthetic oligonucleotide
ccccggtaagaattct

SEQ ID NO: 245 - DNA, 16 bp, Artificial sequence
  Synthetic oligonucleotide
agtcaaattaagccca

SEQ ID NO: 246 - DNA, 16 bp, Artificial sequence
  Synthetic oligonucleotide
gactaactagcttcaa

SEQ ID NO: 247 - DNA, 16 bp, Artificial sequence
  Synthetic oligonucleotide
caacctaatcttgagt

SEQ ID NO: 248 - DNA, 16 bp, Artificial sequence
  Synthetic oligonucleotide
atgtaaagacccttcc

SEQ ID NO: 249 - DNA, 16 bp, Artificial sequence
  Synthetic oligonucleotide
gaatattggcttgtcc

SEQ ID NO: 250 - DNA, 16 bp, Artificial sequence
  Synthetic oligonucleotide
agttagatgaagttgt

SEQ ID NO: 251 - DNA, 16 bp, Artificial sequence
  Synthetic oligonucleotide
gcatttacgcttcctc

SEQ ID NO: 252 - DNA, 16 bp, Artificial sequence
  Synthetic oligonucleotide
aatttttgtcccgttg

SEQ ID NO: 253 - DNA, 16 bp, Artificial sequence
  Synthetic oligonucleotide
cttcacgatgccatct

SEQ ID NO: 254 - DNA, 16 bp, Artificial sequence
  Synthetic oligonucleotide
tttacggtgaacaacc

SEQ ID NO: 255 - DNA, 16 bp, Artificial sequence
  Synthetic oligonucleotide
tgtattacagtttacg

SEQ ID NO: 256 - DNA, 16 bp, Artificial sequence
  Synthetic oligonucleotide
cttaccagaaagttct

SEQ ID NO: 257 - DNA, 16 bp, Artificial sequence
  Synthetic oligonucleotide
cggcacacggatgagt

SEQ ID NO: 258 - DNA, 16 bp, Artificial sequence
  Synthetic oligonucleotide
aagtcgatcattagcg

SEQ ID NO: 259 - DNA, 16 bp, Artificial sequence
  Synthetic oligonucleotide
agcgaagatccacacg

SEQ ID NO: 260 - DNA, 16 bp, Artificial sequence
  Synthetic oligonucleotide
tcataaaggtctctcc

SEQ ID NO: 261 - DNA, 16 bp, Artificial sequence
  Synthetic oligonucleotide
aaaggtactccagtaa

SEQ ID NO: 262 - DNA, 16 bp, Artificial sequence
  Synthetic oligonucleotide
agattctcgaaaggta

SEQ ID NO: 263 - DNA, 16 bp, Artificial sequence
  Synthetic oligonucleotide
tcttaatgggactcac

SEQ ID NO: 264 - DNA, 16 bp, Artificial sequence
  Synthetic oligonucleotide
tgccgaggatggtcca

SEQ ID NO: 265 - DNA, 16 bp, Artificial sequence
  Synthetic oligonucleotide
caaacgactccctgga

SEQ ID NO: 266 - DNA, 16 bp, Artificial sequence
  Synthetic oligonucleotide
tttcgaatttgccata

SEQ ID NO: 267 - DNA, 16 bp, Artificial sequence
  Synthetic oligonucleotide
gctgagagatcttgca

SEQ ID NO: 268 - DNA, 16 bp, Artificial sequence
  Synthetic oligonucleotide
cccgatgacagttctc

SEQ ID NO: 269 - DNA, 16 bp, Artificial sequence
  Synthetic oligonucleotide
gccccggcaaaaactg

SEQ ID NO: 270 - DNA, 16 bp, Artificial sequence
  Synthetic oligonucleotide
tccaattcagttagac

SEQ ID NO: 271 - DNA, 16 bp, Artificial sequence
  Synthetic oligonucleotide
aatctccgaatgttac

SEQ ID NO: 272 - DNA, 16 bp, Artificial sequence
  Synthetic oligonucleotide
gtcgaagcagcactca

SEQ ID NO: 273 - DNA, 16 bp, Artificial sequence
  Synthetic oligonucleotide
tccgaagtcaccgagg

SEQ ID NO: 274 - DNA, 16 bp, Artificial sequence
  Synthetic oligonucleotide
agggaatggctggtgc

SEQ ID NO: 275 - DNA, 16 bp, Artificial sequence
  Synthetic oligonucleotide
taaaattgcgactcct

SEQ ID NO: 276 - DNA, 16 bp, Artificial sequence
  Synthetic oligonucleotide
taccgaggacaaagct

SEQ ID NO: 277 - DNA, 16 bp, Artificial sequence
  Synthetic oligonucleotide
tctccgagagtgttgc

SEQ ID NO: 278 - DNA, 16 bp, Artificial sequence
  Synthetic oligonucleotide
gacgacggtcagctca

SEQ ID NO: 279 - DNA, 16 bp, Artificial sequence
  Synthetic oligonucleotide
accaagaaggctcaaa

SEQ ID NO: 280 - DNA, 16 bp, Artificial sequence
  Synthetic oligonucleotide
ctggatggatcgcagc

SEQ ID NO: 281 - DNA, 16 bp, Artificial sequence
  Synthetic oligonucleotide
aacacccgatgctgtc

SEQ ID NO: 282 - DNA, 16 bp, Artificial sequence
  Synthetic oligonucleotide
gcgggaatgatgatat

SEQ ID NO: 283 - DNA, 16 bp, Artificial sequence
  Synthetic oligonucleotide
agtcaactagttctgt

SEQ ID NO: 284 - DNA, 16 bp, Artificial sequence
  Synthetic oligonucleotide
gctccgcataccctcc

SEQ ID NO: 285 - DNA, 16 bp, Artificial sequence
  Synthetic oligonucleotide
ccctattagctccgca

SEQ ID NO: 286 - DNA, 16 bp, Artificial sequence
  Synthetic oligonucleotide
ctggaaaacggtggag

SEQ ID NO: 287 - DNA, 16 bp, Artificial sequence
  Synthetic oligonucleotide
aattattacggccggg

SEQ ID NO: 288 - DNA, 16 bp, Artificial sequence
  Synthetic oligonucleotide
gaattccgacacatgc

SEQ ID NO: 289 - DNA, 16 bp, Artificial sequence
  Synthetic oligonucleotide
gtatataagtactgac

SEQ ID NO: 290 - DNA, 16 bp, Artificial sequence
  Synthetic oligonucleotide
gcaaagacggtgtagt

SEQ ID NO: 291 - DNA, 16 bp, Artificial sequence
  Synthetic oligonucleotide
ctaagaaaggtcaccc

SEQ ID NO: 292 - DNA, 16 bp, Artificial sequence
  Synthetic oligonucleotide
aacctatagtatggcc

SEQ ID NO: 293 - DNA, 16 bp, Artificial sequence
  Synthetic oligonucleotide
ctacggcaaagacagg

SEQ ID NO: 294 - DNA, 16 bp, Artificial sequence
  Synthetic oligonucleotide
ctaaactggcattccc

SEQ ID NO: 295 - DNA, 16 bp, Artificial sequence
  Synthetic oligonucleotide
tgcttataagccaacc

SEQ ID NO: 296 - DNA, 16 bp, Artificial sequence
  Synthetic oligonucleotide
aaggtgctatctagag

SEQ ID NO: 297 - DNA, 16 bp, Artificial sequence
  Synthetic oligonucleotide
aagaaaatcgcaagcc

SEQ ID NO: 298 - DNA, 16 bp, Artificial sequence
  Synthetic oligonucleotide
ccctaatcctcaagac

SEQ ID NO: 299 - DNA, 16 bp, Artificial sequence
  Synthetic oligonucleotide
tgataagactggtgac

SEQ ID NO: 300 - DNA, 16 bp, Artificial sequence
  Synthetic oligonucleotide
actaagatgtctgtcc

SEQ ID NO: 301 - DNA, 16 bp, Artificial sequence
  Synthetic oligonucleotide
aacacggcgagagtcc

SEQ ID NO: 302 - DNA, 16 bp, Artificial sequence
  Synthetic oligonucleotide
tacgatttgaaattta

SEQ ID NO: 303 - DNA, 16 bp, Artificial sequence
  Synthetic oligonucleotide
gaatacagcacaaggc

SEQ ID NO: 304 - DNA, 16 bp, Artificial sequence
  Synthetic oligonucleotide
ccggaatagagaaagc

SEQ ID NO: 305 - DNA, 16 bp, Artificial sequence
  Synthetic oligonucleotide
tcttatacaatatgag

SEQ ID NO: 306 - DNA, 16 bp, Artificial sequence
  Synthetic oligonucleotide
catgaagacttacccc

SEQ ID NO: 307 - DNA, 16 bp, Artificial sequence
  Synthetic oligonucleotide
tatgcgataacttgca

SEQ ID NO: 308 - DNA, 16 bp, Artificial sequence
  Synthetic oligonucleotide
ggtaaaacatccacca

SEQ ID NO: 309 - DNA, 16 bp, Artificial sequence
  Synthetic oligonucleotide
ctgtagagagcccatt

SEQ ID NO: 310 - DNA, 16 bp, Artificial sequence
  Synthetic oligonucleotide
ataccctaaggcgagg

SEQ ID NO: 311 - DNA, 16 bp, Artificial sequence
  Synthetic oligonucleotide
taatattctaaggcga

SEQ ID NO: 312 - DNA, 16 bp, Artificial sequence
  Synthetic oligonucleotide
aagctataacattagc

SEQ ID NO: 313 - DNA, 16 bp, Artificial sequence
  Synthetic oligonucleotide
cgttacaaatctaaca

SEQ ID NO: 314 - DNA, 16 bp, Artificial sequence
  Synthetic oligonucleotide
aatcgatagatctaca

SEQ ID NO: 315 - DNA, 16 bp, Artificial sequence
  Synthetic oligonucleotide
acttatagatacctat

SEQ ID NO: 316 - DNA, 16 bp, Artificial sequence
  Synthetic oligonucleotide
ataggctatacctaac

SEQ ID NO: 317 - DNA, 16 bp, Artificial sequence
  Synthetic oligonucleotide
cctaacccataggcta

SEQ ID NO: 318 - DNA, 16 bp, Artificial sequence
  Synthetic oligonucleotide
accgaaagcagagcat

SEQ ID NO: 319 - DNA, 16 bp, Artificial sequence
  Synthetic oligonucleotide
taagttaattggttgg

SEQ ID NO: 320 - DNA, 16 bp, Artificial sequence
  Synthetic oligonucleotide
taagcaacggttacac

SEQ ID NO: 321 - DNA, 16 bp, Artificial sequence
  Synthetic oligonucleotide
taagactaataggcaa

SEQ ID NO: 322 - DNA, 16 bp, Artificial sequence
  Synthetic oligonucleotide
ctcgatggaattaaga

SEQ ID NO: 323 - DNA, 16 bp, Artificial sequence
  Synthetic oligonucleotide
atgaagcgagagccat

SEQ ID NO: 324 - DNA, 16 bp, Artificial sequence
  Synthetic oligonucleotide
aaatatccaccacaac

SEQ ID NO: 325 - DNA, 16 bp, Artificial sequence
  Synthetic oligonucleotide
tatgtaaagacccttc

SEQ ID NO: 326 - DNA, 16 bp, Artificial sequence
  Synthetic oligonucleotide
aaacgggttgattgca

SEQ ID NO: 327 - DNA, 16 bp, Artificial sequence
  Synthetic oligonucleotide
gtagttagagttagat

SEQ ID NO: 328 - DNA, 16 bp, Artificial sequence
  Synthetic oligonucleotide
caattaaacaggtcat

SEQ ID NO: 329 - DNA, 16 bp, Artificial sequence
  Synthetic oligonucleotide
aaatttttgtcccgtt

SEQ ID NO: 330 - DNA, 16 bp, Artificial sequence
  Synthetic oligonucleotide
cacttcacgatgccat

SEQ ID NO: 331 - DNA, 16 bp, Artificial sequence
  Synthetic oligonucleotide
gtttacggtgaacaac

SEQ ID NO: 332 - DNA, 16 bp, Artificial sequence
  Synthetic oligonucleotide
aggattgtattacagt

SEQ ID NO: 333 - DNA, 16 bp, Artificial sequence
  Synthetic oligonucleotide
gccaaatgcttaccag

SEQ ID NO: 334 - DNA, 16 bp, Artificial sequence
  Synthetic oligonucleotide
aacacggcacacggat

SEQ ID NO: 335 - DNA, 16 bp, Artificial sequence
  Synthetic oligonucleotide
ttgaagtcgatcatta

SEQ ID NO: 336 - DNA, 16 bp, Artificial sequence
  Synthetic oligonucleotide
cagcgaagatccacac

SEQ ID NO: 337 - DNA, 16 bp, Artificial sequence
  Synthetic oligonucleotide
ctcataaaggtctctc

SEQ ID NO: 338 - DNA, 16 bp, Artificial sequence
  Synthetic oligonucleotide
gaaaggtactccagta

SEQ ID NO: 339 - DNA, 16 bp, Artificial sequence
  Synthetic oligonucleotide
atagagattctcgaaa

SEQ ID NO: 340 - DNA, 16 bp, Artificial sequence
  Synthetic oligonucleotide
atcttaatgggactca

SEQ ID NO: 341 - DNA, 16 bp, Artificial sequence
  Synthetic oligonucleotide
atgccgaggatggtcc

SEQ ID NO: 342 - DNA, 16 bp, Artificial sequence
  Synthetic oligonucleotide
tcaaacgactccctgg

SEQ ID NO: 343 - DNA, 16 bp, Artificial sequence
  Synthetic oligonucleotide
cttttcgaatttgcca

SEQ ID NO: 344 - DNA, 16 bp, Artificial sequence
  Synthetic oligonucleotide
cacgaagtcctcctcc

SEQ ID NO: 345 - DNA, 16 bp, Artificial sequence
  Synthetic oligonucleotide
cacccgatgacagttc

SEQ ID NO: 346 - DNA, 16 bp, Artificial sequence
  Synthetic oligonucleotide
aggccccggcaaaaac

SEQ ID NO: 347 - DNA, 16 bp, Artificial sequence
  Synthetic oligonucleotide
gtccaattcagttaga

SEQ ID NO: 348 - DNA, 16 bp, Artificial sequence
  Synthetic oligonucleotide
caatctccgaatgtta

SEQ ID NO: 349 - DNA, 16 bp, Artificial sequence
  Synthetic oligonucleotide
atgtcgaagcagcact

SEQ ID NO: 350 - DNA, 16 bp, Artificial sequence
  Synthetic oligonucleotide
ttccgaagtcaccgag

SEQ ID NO: 351 - DNA, 16 bp, Artificial sequence
  Synthetic oligonucleotide
atagagtctggtcagg

SEQ ID NO: 352 - DNA, 16 bp, Artificial sequence
  Synthetic oligonucleotide
ataaaattgcgactcc

SEQ ID NO: 353 - DNA, 16 bp, Artificial sequence
  Synthetic oligonucleotide
gtaccgaggacaaagc

SEQ ID NO: 354 - DNA, 16 bp, Artificial sequence
  Synthetic oligonucleotide
aacacctgaagcttgc

SEQ ID NO: 355 - DNA, 16 bp, Artificial sequence
  Synthetic oligonucleotide
agacgacggtcagctc

SEQ ID NO: 356 - DNA, 16 bp, Artificial sequence
  Synthetic oligonucleotide
ccggagaacactggcg

SEQ ID NO: 357 - DNA, 16 bp, Artificial sequence
  Synthetic oligonucleotide
ccggaaggatcacaga

SEQ ID NO: 358 - DNA, 16 bp, Artificial sequence
  Synthetic oligonucleotide
caacacccgatgctgt

SEQ ID NO: 359 - DNA, 16 bp, Artificial sequence
  Synthetic oligonucleotide
tagcgggaatgatgat

SEQ ID NO: 360 - DNA, 16 bp, Artificial sequence
  Synthetic oligonucleotide
tatagtcaactagttc

SEQ ID NO: 361 - DNA, 16 bp, Artificial sequence
  Synthetic oligonucleotide
agctccgcataccctc

SEQ ID NO: 362 - DNA, 16 bp, Artificial sequence
  Synthetic oligonucleotide
gccctattagctccgc

SEQ ID NO: 363 - DNA, 16 bp, Artificial sequence
  Synthetic oligonucleotide
atctttagatcttcca

SEQ ID NO: 364 - DNA, 16 bp, Artificial sequence
  Synthetic oligonucleotide
aaattattacggccgg

SEQ ID NO: 365 - DNA, 16 bp, Artificial sequence
  Synthetic oligonucleotide
gtagaagtaatccagg

SEQ ID NO: 366 - DNA, 16 bp, Artificial sequence
  Synthetic oligonucleotide
gagtatataagtactg

SEQ ID NO: 367 - DNA, 16 bp, Artificial sequence
  Synthetic oligonucleotide
cccataaaagacctct

SEQ ID NO: 368 - DNA, 16 bp, Artificial sequence
  Synthetic oligonucleotide
aaacatgcgaagcagg

SEQ ID NO: 369 - DNA, 16 bp, Artificial sequence
  Synthetic oligonucleotide
gaacctatagtatggc

SEQ ID NO: 370 - DNA, 16 bp, Artificial sequence
  Synthetic oligonucleotide
aatctacggcaaagac

SEQ ID NO: 371 - DNA, 16 bp, Artificial sequence
  Synthetic oligonucleotide
tgctaaactggcattc

SEQ ID NO: 372 - DNA, 16 bp, Artificial sequence
  Synthetic oligonucleotide
ccgtaaggtgaacctt

SEQ ID NO: 373 - DNA, 16 bp, Artificial sequence
  Synthetic oligonucleotide
agccccctaccagggc

SEQ ID NO: 374 - DNA, 16 bp, Artificial sequence
  Synthetic oligonucleotide
aagaaatcagcctcga

SEQ ID NO: 375 - DNA, 16 bp, Artificial sequence
  Synthetic oligonucleotide
atatcgagcatcatgg

SEQ ID NO: 376 - DNA, 16 bp, Artificial sequence
  Synthetic oligonucleotide
attgataagactggtg

SEQ ID NO: 377 - DNA, 16 bp, Artificial sequence
  Synthetic oligonucleotide
tactaagatgtctgtc

SEQ ID NO: 378 - DNA, 16 bp, Artificial sequence
  Synthetic oligonucleotide
ctcgaagaattgcttg

SEQ ID NO: 379 - DNA, 16 bp, Artificial sequence
  Synthetic oligonucleotide
actacgatttgaaatt

SEQ ID NO: 380 - DNA, 16 bp, Artificial sequence
  Synthetic oligonucleotide
gagctccggaatacag

SEQ ID NO: 381 - DNA, 16 bp, Artificial sequence
  Synthetic oligonucleotide
tccggaatagagaaag

SEQ ID NO: 382 - DNA, 16 bp, Artificial sequence
  Synthetic oligonucleotide
caacatcgagggtctg

SEQ ID NO: 383 - DNA, 16 bp, Artificial sequence
  Synthetic oligonucleotide
ccaaagtaacccccat

SEQ ID NO: 384 - DNA, 16 bp, Artificial sequence
  Synthetic oligonucleotide
actatgcgataacttg

SEQ ID NO: 385 - DNA, 16 bp, Artificial sequence
  Synthetic oligonucleotide
aggtaaaacatccacc

SEQ ID NO: 386 - DNA, 16 bp, Artificial sequence
  Synthetic oligonucleotide
aaattggaggtcccac

SEQ ID NO: 387 - DNA, 16 bp, Artificial sequence
  Synthetic oligonucleotide
aataccctaaggcgag

SEQ ID NO: 388 - DNA, 16 bp, Artificial sequence
  Synthetic oligonucleotide
gtaatattctaaggcg

SEQ ID NO: 389 - DNA, 16 bp, Artificial sequence
  Synthetic oligonucleotide
aaccaggcgggtgtgt

SEQ ID NO: 390 - DNA, 16 bp, Artificial sequence
  Synthetic oligonucleotide
agttaagatcaggtcg

SEQ ID NO: 391 - DNA, 16 bp, Artificial sequence
  Synthetic oligonucleotide
caatcgatagatctac

SEQ ID NO: 392 - DNA, 16 bp, Artificial sequence
  Synthetic oligonucleotide
cacttatagataccta

SEQ ID NO: 393 - DNA, 16 bp, Artificial sequence
  Synthetic oligonucleotide
cataggctatacctaa

SEQ ID NO: 394 - DNA, 16 bp, Artificial sequence
  Synthetic oligonucleotide
acataggctataccta

SEQ ID NO: 395 - DNA, 16 bp, Artificial sequence
  Synthetic oligonucleotide
gaaccgaaagcagagc

SEQ ID NO: 396 - DNA, 16 bp, Artificial sequence
  Synthetic oligonucleotide
acggatatcttgccat

SEQ ID NO: 397 - DNA, 16 bp, Artificial sequence
  Synthetic oligonucleotide
attaagcaacggttac

SEQ ID NO: 398 - DNA, 16 bp, Artificial sequence
  Synthetic oligonucleotide
agtaagactaataggc

SEQ ID NO: 399 - DNA, 16 bp, Artificial sequence
  Synthetic oligonucleotide
gccttttagagcataa

SEQ ID NO: 400 - DNA, 16 bp, Artificial sequence
  Synthetic oligonucleotide
aatgaagcgagagcca

SEQ ID NO: 401 - DNA, 16 bp, Artificial sequence
  Synthetic oligonucleotide
acgaagttcggttcct

SEQ ID NO: 402 - DNA, 16 bp, Artificial sequence
  Synthetic oligonucleotide
ctatgtaaagaccctt

SEQ ID NO: 403 - DNA, 16 bp, Artificial sequence
  Synthetic oligonucleotide
aaaacgggttgattgc

SEQ ID NO: 404 - DNA, 16 bp, Artificial sequence
  Synthetic oligonucleotide
aagtagttagagttag

SEQ ID NO: 405 - DNA, 16 bp, Artificial sequence
  Synthetic oligonucleotide
cgacaattaaacaggt

SEQ ID NO: 406 - DNA, 16 bp, Artificial sequence
  Synthetic oligonucleotide
aaaatttttgtcccgt

SEQ ID NO: 407 - DNA, 16 bp, Artificial sequence
  Synthetic oligonucleotide
ccacttcacgatgcca

SEQ ID NO: 408 - DNA, 16 bp, Artificial sequence
  Synthetic oligonucleotide
agtttacggtgaacaa

SEQ ID NO: 409 - DNA, 16 bp, Artificial sequence
  Synthetic oligonucleotide
acaggattgtattaca

SEQ ID NO: 410 - DNA, 16 bp, Artificial sequence
  Synthetic oligonucleotide
agttagccaaatgctt

SEQ ID NO: 411 - DNA, 16 bp, Artificial sequence
  Synthetic oligonucleotide
gtgaacacggcacacg

SEQ ID NO: 412 - DNA, 16 bp, Artificial sequence
  Synthetic oligonucleotide
attgaagtcgatcatt

SEQ ID NO: 413 - DNA, 16 bp, Artificial sequence
  Synthetic oligonucleotide
gcagcgaagatccaca

SEQ ID NO: 414 - DNA, 16 bp, Artificial sequence
  Synthetic oligonucleotide
tctcataaaggtctct

SEQ ID NO: 415 - DNA, 16 bp, Artificial sequence
  Synthetic oligonucleotide
cgaaaggtactccagt

SEQ ID NO: 416 - DNA, 16 bp, Artificial sequence
  Synthetic oligonucleotide
aatagagattctcgaa

SEQ ID NO: 417 - DNA, 16 bp, Artificial sequence
  Synthetic oligonucleotide
catcttaatgggactc

SEQ ID NO: 418 - DNA, 16 bp, Artificial sequence
  Synthetic oligonucleotide
catgccgaggatggtc

SEQ ID NO: 419 - DNA, 16 bp, Artificial sequence
  Synthetic oligonucleotide
ttcaaacgactccctg

SEQ ID NO: 420 - DNA, 16 bp, Artificial sequence
  Synthetic oligonucleotide
ccttttcgaatttgcc

SEQ ID NO: 421 - DNA, 16 bp, Artificial sequence
  Synthetic oligonucleotide
gcacgaagtcctcctc

SEQ ID NO: 422 - DNA, 16 bp, Artificial sequence
  Synthetic oligonucleotide
tccacccgatgacagt

SEQ ID NO: 423 - DNA, 16 bp, Artificial sequence
  Synthetic oligonucleotide
aaagaggccccggcaa

SEQ ID NO: 424 - DNA, 16 bp, Artificial sequence
  Synthetic oligonucleotide
acacaacactctcatc

SEQ ID NO: 425 - DNA, 16 bp, Artificial sequence
  Synthetic oligonucleotide
tgcgagaggccacagc

SEQ ID NO: 426 - DNA, 16 bp, Artificial sequence
  Synthetic oligonucleotide
agatgtcgaagcagca

SEQ ID NO: 427 - DNA, 16 bp, Artificial sequence
  Synthetic oligonucleotide
attccgaagtcaccga

SEQ ID NO: 428 - DNA, 16 bp, Artificial sequence
  Synthetic oligonucleotide
catagagtctggtcag

SEQ ID NO: 429 - DNA, 16 bp, Artificial sequence
  Synthetic oligonucleotide
cataaaattgcgactc

SEQ ID NO: 430 - DNA, 16 bp, Artificial sequence
  Synthetic oligonucleotide
agtaccgaggacaaag

SEQ ID NO: 431 - DNA, 16 bp, Artificial sequence
  Synthetic oligonucleotide
acagaacatcatgacc

SEQ ID NO: 432 - DNA, 16 bp, Artificial sequence
  Synthetic oligonucleotide
aagacgacggtcagct

SEQ ID NO: 433 - DNA, 16 bp, Artificial sequence
  Synthetic oligonucleotide
accggagaacactggc

SEQ ID NO: 434 - DNA, 16 bp, Artificial sequence
  Synthetic oligonucleotide
ccaccggaaggatcac

SEQ ID NO: 435 - DNA, 16 bp, Artificial sequence
  Synthetic oligonucleotide
caacaacacccgatgc

SEQ ID NO: 436 - DNA, 16 bp, Artificial sequence
  Synthetic oligonucleotide
atagcgggaatgatga

SEQ ID NO: 437 - DNA, 16 bp, Artificial sequence
  Synthetic oligonucleotide
aaactatggttgctgc

SEQ ID NO: 438 - DNA, 16 bp, Artificial sequence
  Synthetic oligonucleotide
tagctccgcataccct

SEQ ID NO: 439 - DNA, 16 bp, Artificial sequence
  Synthetic oligonucleotide
agccctattagctccg

SEQ ID NO: 440 - DNA, 16 bp, Artificial sequence
  Synthetic oligonucleotide
aactagcaatcacctg

SEQ ID NO: 441 - DNA, 16 bp, Artificial sequence
  Synthetic oligonucleotide
aaaattattacggccg

SEQ ID NO: 442 - DNA, 16 bp, Artificial sequence
  Synthetic oligonucleotide
taccgtatgattcaga

SEQ ID NO: 443 - DNA, 16 bp, Artificial sequence
  Synthetic oligonucleotide
agcaaagtacttctac

SEQ ID NO: 444 - DNA, 16 bp, Artificial sequence
  Synthetic oligonucleotide
aacaagagttagtcac

SEQ ID NO: 445 - DNA, 16 bp, Artificial sequence
  Synthetic oligonucleotide
caaacatgcgaagcag

SEQ ID NO: 446 - DNA, 16 bp, Artificial sequence
  Synthetic oligonucleotide
cgcttaatcaccgccg

SEQ ID NO: 447 - DNA, 16 bp, Artificial sequence
  Synthetic oligonucleotide
taatctacggcaaaga

SEQ ID NO: 448 - DNA, 16 bp, Artificial sequence
  Synthetic oligonucleotide
acttaataccttgtgc

SEQ ID NO: 449 - DNA, 16 bp, Artificial sequence
  Synthetic oligonucleotide
caaaatccatacgctg

SEQ ID NO: 450 - DNA, 16 bp, Artificial sequence
  Synthetic oligonucleotide
tgccatctagagggat

SEQ ID NO: 451 - DNA, 16 bp, Artificial sequence
  Synthetic oligonucleotide
caatctaggaattaga

SEQ ID NO: 452 - DNA, 16 bp, Artificial sequence
  Synthetic oligonucleotide
tatatcgagcatcatg

SEQ ID NO: 453 - DNA, 16 bp, Artificial sequence
  Synthetic oligonucleotide
aattgataagactggt

SEQ ID NO: 454 - DNA, 16 bp, Artificial sequence
  Synthetic oligonucleotide
gtactaagatgtctgt

SEQ ID NO: 455 - DNA, 16 bp, Artificial sequence
  Synthetic oligonucleotide
actcgaagaattgctt

SEQ ID NO: 456 - DNA, 16 bp, Artificial sequence
  Synthetic oligonucleotide
aaggttaaatgtccca

SEQ ID NO: 457 - DNA, 16 bp, Artificial sequence
  Synthetic oligonucleotide
agagctccggaataca

SEQ ID NO: 458 - DNA, 16 bp, Artificial sequence
  Synthetic oligonucleotide
ctccggaatagagaaa

SEQ ID NO: 459 - DNA, 16 bp, Artificial sequence
  Synthetic oligonucleotide
acaacatcgagggtct

SEQ ID NO: 460 - DNA, 16 bp, Artificial sequence
  Synthetic oligonucleotide
accaaagtaaccccca

SEQ ID NO: 461 - DNA, 16 bp, Artificial sequence
  Synthetic oligonucleotide
cactatgcgataactt

SEQ ID NO: 462 - DNA, 16 bp, Artificial sequence
  Synthetic oligonucleotide
tattagtgggtattcc

SEQ ID NO: 463 - DNA, 16 bp, Artificial sequence
  Synthetic oligonucleotide
gctaaattggaggtcc

SEQ ID NO: 464 - DNA, 16 bp, Artificial sequence
  Synthetic oligonucleotide
taataccctaaggcga

SEQ ID NO: 465 - DNA, 16 bp, Artificial sequence
  Synthetic oligonucleotide
agtaactacatagagc

SEQ ID NO: 466 - DNA, 16 bp, Artificial sequence
  Synthetic oligonucleotide
taaaccaggcgggtgt

SEQ ID NO: 467 - DNA, 16 bp, Artificial sequence
  Synthetic oligonucleotide
agatagggtgttatgg

SEQ ID NO: 468 - DNA, 16 bp, Artificial sequence
  Synthetic oligonucleotide
cccaatcgatagatct

SEQ ID NO: 469 - DNA, 16 bp, Artificial sequence
  Synthetic oligonucleotide
aaaagtctcgactgat

SEQ ID NO: 470 - DNA, 16 bp, Artificial sequence
  Synthetic oligonucleotide
ccataggctataccta

SEQ ID NO: 471 - DNA, 16 bp, Artificial sequence
  Synthetic oligonucleotide
aaatgtagctatacct

SEQ ID NO: 472 - DNA, 16 bp, Artificial sequence
  Synthetic oligonucleotide
agctaagatgtcactc

SEQ ID NO: 473 - DNA, 16 bp, Artificial sequence
  Synthetic oligonucleotide
aagcacggatatcttg

SEQ ID NO: 474 - DNA, 16 bp, Artificial sequence
  Synthetic oligonucleotide
ctattaagcaacggtt

SEQ ID NO: 475 - DNA, 16 bp, Artificial sequence
  Synthetic oligonucleotide
aagtaagactaatagg

SEQ ID NO: 476 - DNA, 16 bp, Artificial sequence
  Synthetic oligonucleotide
aatccccgtaacactg

SEQ ID NO: 477 - DNA, 16 bp, Artificial sequence
  Synthetic oligonucleotide
aaatgaagcgagagcc

SEQ ID NO: 478 - DNA, 16 bp, Artificial sequence
  Synthetic oligonucleotide
tacgaagttcggttcc

SEQ ID NO: 479 - DNA, 16 bp, Artificial sequence
  Synthetic oligonucleotide
tataatctggaggcca

SEQ ID NO: 480 - DNA, 16 bp, Artificial sequence
  Synthetic oligonucleotide
gaaaacgggttgattg

SEQ ID NO: 481 - DNA, 16 bp, Artificial sequence
  Synthetic oligonucleotide
aatgtacggtacttaa

SEQ ID NO: 482 - DNA, 16 bp, Artificial sequence
  Synthetic oligonucleotide
tataatgaaccccctg

SEQ ID NO: 483 - DNA, 16 bp, Artificial sequence
  Synthetic oligonucleotide
tgacccatcagcaaga

SEQ ID NO: 484 - DNA, 16 bp, Artificial sequence
  Synthetic oligonucleotide
acaaccacttcacgat

SEQ ID NO: 485 - DNA, 16 bp, Artificial sequence
  Synthetic oligonucleotide
cagtttacggtgaaca

SEQ ID NO: 486 - DNA, 16 bp, Artificial sequence
  Synthetic oligonucleotide
cataaacaggattgta

SEQ ID NO: 487 - DNA, 16 bp, Artificial sequence
  Synthetic oligonucleotide
aagttagccaaatgct

SEQ ID NO: 488 - DNA, 16 bp, Artificial sequence
  Synthetic oligonucleotide
agtgaacacggcacac

SEQ ID NO: 489 - DNA, 16 bp, Artificial sequence
  Synthetic oligonucleotide
cattgaagtcgatcat

SEQ ID NO: 490 - DNA, 16 bp, Artificial sequence
  Synthetic oligonucleotide
cgcagcgaagatccac

SEQ ID NO: 491 - DNA, 16 bp, Artificial sequence
  Synthetic oligonucleotide
tgggattcgaaacacg

SEQ ID NO: 492 - DNA, 16 bp, Artificial sequence
  Synthetic oligonucleotide
tcgaaaggtactccag

SEQ ID NO: 493 - DNA, 16 bp, Artificial sequence
  Synthetic oligonucleotide
aaatagagattctcga

SEQ ID NO: 494 - DNA, 16 bp, Artificial sequence
  Synthetic oligonucleotide
cgacagtggatataga

SEQ ID NO: 495 - DNA, 16 bp, Artificial sequence
  Synthetic oligonucleotide
acatgccgaggatggt

SEQ ID NO: 496 - DNA, 16 bp, Artificial sequence
  Synthetic oligonucleotide
agcttcaaacgactcc

SEQ ID NO: 497 - DNA, 16 bp, Artificial sequence
  Synthetic oligonucleotide
cccttttcgaatttgc

SEQ ID NO: 498 - DNA, 16 bp, Artificial sequence
  Synthetic oligonucleotide
aaatagtccatggccc

SEQ ID NO: 499 - DNA, 16 bp, Artificial sequence
  Synthetic oligonucleotide
ctccacccgatgacag

SEQ ID NO: 500 - DNA, 16 bp, Artificial sequence
  Synthetic oligonucleotide
aaaagaggccccggca

SEQ ID NO: 501 - DNA, 16 bp, Artificial sequence
  Synthetic oligonucleotide
ccgaatgttacagcca

SEQ ID NO: 502 - DNA, 16 bp, Artificial sequence
  Synthetic oligonucleotide
atgcgagaggccacag

SEQ ID NO: 503 - DNA, 16 bp, Artificial sequence
  Synthetic oligonucleotide
aaggagatgtcgaagc

SEQ ID NO: 504 - DNA, 16 bp, Artificial sequence
  Synthetic oligonucleotide
gattccgaagtcaccg

SEQ ID NO: 505 - DNA, 16 bp, Artificial sequence
  Synthetic oligonucleotide
acatagagtctggtca

SEQ ID NO: 506 - DNA, 16 bp, Artificial sequence
  Synthetic oligonucleotide
acataaaattgcgact

SEQ ID NO: 507 - DNA, 16 bp, Artificial sequence
  Synthetic oligonucleotide
gagtaccgaggacaaa

SEQ ID NO: 508 - DNA, 16 bp, Artificial sequence
  Synthetic oligonucleotide
tctaacgcactttttg

SEQ ID NO: 509 - DNA, 16 bp, Artificial sequence
  Synthetic oligonucleotide
aaagacgacggtcagc

SEQ ID NO: 510 - DNA, 16 bp, Artificial sequence
  Synthetic oligonucleotide
gaccggagaacactgg

SEQ ID NO: 511 - DNA, 16 bp, Artificial sequence
  Synthetic oligonucleotide
ctccaccggaaggatc

SEQ ID NO: 512 - DNA, 16 bp, Artificial sequence
  Synthetic oligonucleotide
gatgacaacaacaccc

SEQ ID NO: 513 - DNA, 16 bp, Artificial sequence
  Synthetic oligonucleotide
gatagcgggaatgatg

SEQ ID NO: 514 - DNA, 16 bp, Artificial sequence
  Synthetic oligonucleotide
cataccctcccagctc

SEQ ID NO: 515 - DNA, 16 bp, Artificial sequence
  Synthetic oligonucleotide
ttagctccgcataccc

SEQ ID NO: 516 - DNA, 16 bp, Artificial sequence
  Synthetic oligonucleotide
cagccctattagctcc

SEQ ID NO: 517 - DNA, 16 bp, Artificial sequence
  Synthetic oligonucleotide
agatatgagaccatgt

SEQ ID NO: 518 - DNA, 16 bp, Artificial sequence
  Synthetic oligonucleotide
aaaaattattacggcc

SEQ ID NO: 519 - DNA, 16 bp, Artificial sequence
  Synthetic oligonucleotide
cactaccgtgagaggg

SEQ ID NO: 520 - DNA, 16 bp, Artificial sequence
  Synthetic oligonucleotide
gataataccagaagct

SEQ ID NO: 521 - DNA, 16 bp, Artificial sequence
  Synthetic oligonucleotide
tatcttaagaaggcat

SEQ ID NO: 522 - DNA, 16 bp, Artificial sequence
  Synthetic oligonucleotide
caaaagtctggttggg

SEQ ID NO: 523 - DNA, 16 bp, Artificial sequence
  Synthetic oligonucleotide
taagtaatctgcatcc

SEQ ID NO: 524 - DNA, 16 bp, Artificial sequence
  Synthetic oligonucleotide
ttacggtaatctacgg

SEQ ID NO: 525 - DNA, 16 bp, Artificial sequence
  Synthetic oligonucleotide
tacttaataccttgtg

SEQ ID NO: 526 - DNA, 16 bp, Artificial sequence
  Synthetic oligonucleotide
taatgagtagttctgc

SEQ ID NO: 527 - DNA, 16 bp, Artificial sequence
  Synthetic oligonucleotide
tgccagggctccaatc

SEQ ID NO: 528 - DNA, 16 bp, Artificial sequence
  Synthetic oligonucleotide
atcttagactttcggc

SEQ ID NO: 529 - DNA, 16 bp, Artificial sequence
  Synthetic oligonucleotide
atatatcgagcatcat

SEQ ID NO: 530 - DNA, 16 bp, Artificial sequence
  Synthetic oligonucleotide
gacgaggaaaagtgga

SEQ ID NO: 531 - DNA, 16 bp, Artificial sequence
  Synthetic oligonucleotide
atcgaatcagaatttt

SEQ ID NO: 532 - DNA, 16 bp, Artificial sequence
  Synthetic oligonucleotide
tactcgaagaattgct

SEQ ID NO: 533 - DNA, 16 bp, Artificial sequence
  Synthetic oligonucleotide
taaggttaaatgtccc

SEQ ID NO: 534 - DNA, 16 bp, Artificial sequence
  Synthetic oligonucleotide
agagagctccggaata

SEQ ID NO: 535 - DNA, 16 bp, Artificial sequence
  Synthetic oligonucleotide
gctccggaatagagaa

SEQ ID NO: 536 - DNA, 16 bp, Artificial sequence
  Synthetic oligonucleotide
gcataatgtccccgag

SEQ ID NO: 537 - DNA, 16 bp, Artificial sequence
  Synthetic oligonucleotide
gaccaaagtaaccccc

SEQ ID NO: 538 - DNA, 16 bp, Artificial sequence
  Synthetic oligonucleotide
tagtgtagaggctgca

SEQ ID NO: 539 - DNA, 16 bp, Artificial sequence
  Synthetic oligonucleotide
attattagtgggtatt

SEQ ID NO: 540 - DNA, 16 bp, Artificial sequence
  Synthetic oligonucleotide
agctaaattggaggtc

SEQ ID NO: 541 - DNA, 16 bp, Artificial sequence
  Synthetic oligonucleotide
ctaaggcgatttgcta

SEQ ID NO: 542 - DNA, 16 bp, Artificial sequence
  Synthetic oligonucleotide
cctataaggacccagc

SEQ ID NO: 543 - DNA, 16 bp, Artificial sequence
  Synthetic oligonucleotide
accaatatatgttcac

SEQ ID NO: 544 - DNA, 16 bp, Artificial sequence
  Synthetic oligonucleotide
aatagatagggtgtta

SEQ ID NO: 545 - DNA, 16 bp, Artificial sequence
  Synthetic oligonucleotide
gtaaagcacactatgg

SEQ ID NO: 546 - DNA, 16 bp, Artificial sequence
  Synthetic oligonucleotide
taaaagtctcgactga

SEQ ID NO: 547 - DNA, 16 bp, Artificial sequence
  Synthetic oligonucleotide
cccataggctatacct

SEQ ID NO: 548 - DNA, 16 bp, Artificial sequence
  Synthetic oligonucleotide
ccaaagttcgagagaa

SEQ ID NO: 549 - DNA, 16 bp, Artificial sequence
  Synthetic oligonucleotide
taattcatagctgggc

SEQ ID NO: 550 - DNA, 16 bp, Artificial sequence
  Synthetic oligonucleotide
atttaccaagcacgga

SEQ ID NO: 551 - DNA, 16 bp, Artificial sequence
  Synthetic oligonucleotide
actattaagcaacggt

SEQ ID NO: 552 - DNA, 16 bp, Artificial sequence
  Synthetic oligonucleotide
cagtaagtaagactaa

SEQ ID NO: 553 - DNA, 16 bp, Artificial sequence
  Synthetic oligonucleotide
actaataatccccgta

SEQ ID NO: 554 - DNA, 16 bp, Artificial sequence
  Synthetic oligonucleotide
caaatgaagcgagagc

SEQ ID NO: 555 - DNA, 16 bp, Artificial sequence
  Synthetic oligonucleotide
ttctacgaagttcggt

SEQ ID NO: 556 - DNA, 16 bp, Artificial sequence
  Synthetic oligonucleotide
acatagcacataagat

SEQ ID NO: 557 - DNA, 16 bp, Artificial sequence
  Synthetic oligonucleotide
agaaaacgggttgatt

SEQ ID NO: 558 - DNA, 16 bp, Artificial sequence
  Synthetic oligonucleotide
taatgtacggtactta

SEQ ID NO: 559 - DNA, 16 bp, Artificial sequence
  Synthetic oligonucleotide
taactatctagttggg

SEQ ID NO: 560 - DNA, 16 bp, Artificial sequence
  Synthetic oligonucleotide
cttgacccatcagcaa

SEQ ID NO: 561 - DNA, 16 bp, Artificial sequence
  Synthetic oligonucleotide
ggtgaacaaccacttc

SEQ ID NO: 562 - DNA, 16 bp, Artificial sequence
  Synthetic oligonucleotide
acagtttacggtgaac

SEQ ID NO: 563 - DNA, 16 bp, Artificial sequence
  Synthetic oligonucleotide
ccataaacaggattgt

SEQ ID NO: 564 - DNA, 16 bp, Artificial sequence
  Synthetic oligonucleotide
agttagccaaggccgg

SEQ ID NO: 565 - DNA, 16 bp, Artificial sequence
  Synthetic oligonucleotide
taccaggcagtgaaca

SEQ ID NO: 566 - DNA, 16 bp, Artificial sequence
  Synthetic oligonucleotide
ccattgaagtcgatca

SEQ ID NO: 567 - DNA, 16 bp, Artificial sequence
  Synthetic oligonucleotide
tcgcagcgaagatcca

SEQ ID NO: 568 - DNA, 16 bp, Artificial sequence
  Synthetic oligonucleotide
gtgggattcgaaacac

SEQ ID NO: 569 - DNA, 16 bp, Artificial sequence
  Synthetic oligonucleotide
ctcgaaaggtactcca

SEQ ID NO: 570 - DNA, 16 bp, Artificial sequence
  Synthetic oligonucleotide
acccagacgggcattc

SEQ ID NO: 571 - DNA, 16 bp, Artificial sequence
  Synthetic oligonucleotide
ctcacgatcttgtgga

SEQ ID NO: 572 - DNA, 16 bp, Artificial sequence
  Synthetic oligonucleotide
cctgaggtcggactcc

SEQ ID NO: 573 - DNA, 16 bp, Artificial sequence
  Synthetic oligonucleotide
cagaaggactgtcacg

SEQ ID NO: 574 - DNA, 16 bp, Artificial sequence
  Synthetic oligonucleotide
ccccttttcgaatttg

SEQ ID NO: 575 - DNA, 16 bp, Artificial sequence
  Synthetic oligonucleotide
gaaatagtccatggcc

SEQ ID NO: 576 - DNA, 16 bp, Artificial sequence
  Synthetic oligonucleotide
tgttatggagaaaccc

SEQ ID NO: 577 - DNA, 16 bp, Artificial sequence
  Synthetic oligonucleotide
gaaaagaggccccggc

SEQ ID NO: 578 - DNA, 16 bp, Artificial sequence
  Synthetic oligonucleotide
tccgaatgttacagcc

SEQ ID NO: 579 - DNA, 16 bp, Artificial sequence
  Synthetic oligonucleotide
catgcgagaggccaca

SEQ ID NO: 580 - DNA, 16 bp, Artificial sequence
  Synthetic oligonucleotide
ccaaggagatgtcgaa

SEQ ID NO: 581 - DNA, 16 bp, Artificial sequence
  Synthetic oligonucleotide
tgattccgaagtcacc

SEQ ID NO: 582 - DNA, 16 bp, Artificial sequence
  Synthetic oligonucleotide
ccacatagagtctggt

SEQ ID NO: 583 - DNA, 16 bp, Artificial sequence
  Synthetic oligonucleotide
cacataaaattgcgac

SEQ ID NO: 584 - DNA, 16 bp, Artificial sequence
  Synthetic oligonucleotide
gattagtgctgagtac

SEQ ID NO: 585 - DNA, 16 bp, Artificial sequence
  Synthetic oligonucleotide
ttctaacgcacttttt

SEQ ID NO: 586 - DNA, 16 bp, Artificial sequence
  Synthetic oligonucleotide
caaagacgacggtcag

SEQ ID NO: 587 - DNA, 16 bp, Artificial sequence
  Synthetic oligonucleotide
ggaccggagaacactg

SEQ ID NO: 588 - DNA, 16 bp, Artificial sequence
  Synthetic oligonucleotide
gtaaaggagatgccca

SEQ ID NO: 589 - DNA, 16 bp, Artificial sequence
  Synthetic oligonucleotide
caagaggaacatcctc

SEQ ID NO: 590 - DNA, 16 bp, Artificial sequence
  Synthetic oligonucleotide
agatagcgggaatgat

SEQ ID NO: 591 - DNA, 16 bp, Artificial sequence
  Synthetic oligonucleotide
gcataccctcccagct

SEQ ID NO: 592 - DNA, 16 bp, Artificial sequence
  Synthetic oligonucleotide
attagctccgcatacc

SEQ ID NO: 593 - DNA, 16 bp, Artificial sequence
  Synthetic oligonucleotide
cctgaggtgactgctc

SEQ ID NO: 594 - DNA, 16 bp, Artificial sequence
  Synthetic oligonucleotide
gactaggaagcctgcc

SEQ ID NO: 595 - DNA, 16 bp, Artificial sequence
  Synthetic oligonucleotide
taaaaattattacggc

SEQ ID NO: 596 - DNA, 16 bp, Artificial sequence
  Synthetic oligonucleotide
gactaatcatggcagg

SEQ ID NO: 597 - DNA, 16 bp, Artificial sequence
  Synthetic oligonucleotide
ggataataccagaagc

SEQ ID NO: 598 - DNA, 16 bp, Artificial sequence
  Synthetic oligonucleotide
cactagatagcatatc

SEQ ID NO: 599 - DNA, 16 bp, Artificial sequence
  Synthetic oligonucleotide
caattgaaacctggcc

SEQ ID NO: 600 - DNA, 16 bp, Artificial sequence
  Synthetic oligonucleotide
taggaaaggtgccgag

SEQ ID NO: 601 - DNA, 16 bp, Artificial sequence
  Synthetic oligonucleotide
cttacggtaatctacg

SEQ ID NO: 602 - DNA, 16 bp, Artificial sequence
  Synthetic oligonucleotide
atatttgtaggcaatc

SEQ ID NO: 603 - DNA, 16 bp, Artificial sequence
  Synthetic oligonucleotide
tcttaatgagtagttc

SEQ ID NO: 604 - DNA, 16 bp, Artificial sequence
  Synthetic oligonucleotide
agctatatggatcttt

SEQ ID NO: 605 - DNA, 16 bp, Artificial sequence
  Synthetic oligonucleotide
acattaggtcttgtgt

SEQ ID NO: 606 - DNA, 16 bp, Artificial sequence
  Synthetic oligonucleotide
aatatatcgagcatca

SEQ ID NO: 607 - DNA, 16 bp, Artificial sequence
  Synthetic oligonucleotide
aaacgcaaaccccatc

SEQ ID NO: 608 - DNA, 16 bp, Artificial sequence
  Synthetic oligonucleotide
cacaatcgaatcagaa

SEQ ID NO: 609 - DNA, 16 bp, Artificial sequence
  Synthetic oligonucleotide
actactcgaagaattg

SEQ ID NO: 610 - DNA, 16 bp, Artificial sequence
  Synthetic oligonucleotide
caatagttcataggtc

SEQ ID NO: 611 - DNA, 16 bp, Artificial sequence
  Synthetic oligonucleotide
accagagagctccgga

SEQ ID NO: 612 - DNA, 16 bp, Artificial sequence
  Synthetic oligonucleotide
agctccggaatagaga

SEQ ID NO: 613 - DNA, 16 bp, Artificial sequence
  Synthetic oligonucleotide
tataaggacaatcaga

SEQ ID NO: 614 - DNA, 16 bp, Artificial sequence
  Synthetic oligonucleotide
acattatatgcctcca

SEQ ID NO: 615 - DNA, 16 bp, Artificial sequence
  Synthetic oligonucleotide
ctagtgtagaggctgc

SEQ ID NO: 616 - DNA, 16 bp, Artificial sequence
  Synthetic oligonucleotide
gattattagtgggtat

SEQ ID NO: 617 - DNA, 16 bp, Artificial sequence
  Synthetic oligonucleotide
aagctaaattggaggt

SEQ ID NO: 618 - DNA, 16 bp, Artificial sequence
  Synthetic oligonucleotide
tctaaggcgatttgct

SEQ ID NO: 619 - DNA, 16 bp, Artificial sequence
  Synthetic oligonucleotide
acctataaggacccag

SEQ ID NO: 620 - DNA, 16 bp, Artificial sequence
  Synthetic oligonucleotide
caaccaatatatgttc

SEQ ID NO: 621 - DNA, 16 bp, Artificial sequence
  Synthetic oligonucleotide
ttcaatagatagggtg

SEQ ID NO: 622 - DNA, 16 bp, Artificial sequence
  Synthetic oligonucleotide
tatggtaaagcacact

SEQ ID NO: 623 - DNA, 16 bp, Artificial sequence
  Synthetic oligonucleotide
gcataaaagtctcgac

SEQ ID NO: 624 - DNA, 16 bp, Artificial sequence
  Synthetic oligonucleotide
acccataggctatacc

SEQ ID NO: 625 - DNA, 16 bp, Artificial sequence
  Synthetic oligonucleotide
taaaccaatgttgcaa

SEQ ID NO: 626 - DNA, 16 bp, Artificial sequence
  Synthetic oligonucleotide
actaattcatagctgg

SEQ ID NO: 627 - DNA, 16 bp, Artificial sequence
  Synthetic oligonucleotide
acctaactgagctcta

SEQ ID NO: 628 - DNA, 16 bp, Artificial sequence
  Synthetic oligonucleotide
aactattaagcaacgg

SEQ ID NO: 629 - DNA, 16 bp, Artificial sequence
  Synthetic oligonucleotide
gaatagcgcaggtgat

SEQ ID NO: 630 - DNA, 16 bp, Artificial sequence
  Synthetic oligonucleotide
ccaaaggacttactcc

SEQ ID NO: 631 - DNA, 16 bp, Artificial sequence
  Synthetic oligonucleotide
gcaaatgaagcgagag

SEQ ID NO: 632 - DNA, 16 bp, Artificial sequence
  Synthetic oligonucleotide
catagacgagttctac

SEQ ID NO: 633 - DNA, 16 bp, Artificial sequence
  Synthetic oligonucleotide
cattaatatggacaga

SEQ ID NO: 634 - DNA, 16 bp, Artificial sequence
  Synthetic oligonucleotide
tgagaaaacgggttga

SEQ ID NO: 635 - DNA, 16 bp, Artificial sequence
  Synthetic oligonucleotide
ctaatgtacggtactt

SEQ ID NO: 636 - DNA, 16 bp, Artificial sequence
  Synthetic oligonucleotide
ttaactatctagttgg

SEQ ID NO: 637 - DNA, 16 bp, Artificial sequence
  Synthetic oligonucleotide
attcctcaacttcagt

SEQ ID NO: 638 - DNA, 16 bp, Artificial sequence
  Synthetic oligonucleotide
ttcacgatgccatctt

SEQ ID NO: 639 - DNA, 16 bp, Artificial sequence
  Synthetic oligonucleotide
tccaggagtgtgtcct

SEQ ID NO: 640 - DNA, 16 bp, Artificial sequence
  Synthetic oligonucleotide
catgactgtaacaagt

SEQ ID NO: 641 - DNA, 16 bp, Artificial sequence
  Synthetic oligonucleotide
tccttaggcttcggtc

SEQ ID NO: 642 - DNA, 16 bp, Artificial sequence
  Synthetic oligonucleotide
gatgcagcccttctgg

SEQ ID NO: 643 - DNA, 16 bp, Artificial sequence
  Synthetic oligonucleotide
ctccccattgaagtcg

SEQ ID NO: 644 - DNA, 16 bp, Artificial sequence
  Synthetic oligonucleotide
ctcctgttgatcgcag

SEQ ID NO: 645 - DNA, 16 bp, Artificial sequence
  Synthetic oligonucleotide
cacagtgggattcgaa

SEQ ID NO: 646 - DNA, 16 bp, Artificial sequence
  Synthetic oligonucleotide
tacggtaatctttctt

SEQ ID NO: 647 - DNA, 16 bp, Artificial sequence
  Synthetic oligonucleotide
ctgtcttcaatgcact

SEQ ID NO: 648 - DNA, 16 bp, Artificial sequence
  Synthetic oligonucleotide
ggctcagaatgctcat

SEQ ID NO: 649 - DNA, 16 bp, Artificial sequence
  Synthetic oligonucleotide
acgatcttgtggatgg

SEQ ID NO: 650 - DNA, 16 bp, Artificial sequence
  Synthetic oligonucleotide
tcaggagaatgtctcc

SEQ ID NO: 651 - DNA, 16 bp, Artificial sequence
  Synthetic oligonucleotide
gatgtctgggcaaggc

SEQ ID NO: 652 - DNA, 16 bp, Artificial sequence
  Synthetic oligonucleotide
ggttcatcctcaggaa

SEQ ID NO: 653 - DNA, 16 bp, Artificial sequence
  Synthetic oligonucleotide
aaataccccttttcga

SEQ ID NO: 654 - DNA, 16 bp, Artificial sequence
  Synthetic oligonucleotide
gatcttgcaacttaat

SEQ ID NO: 655 - DNA, 16 bp, Artificial sequence
  Synthetic oligonucleotide
tttgcacgaagtcctc

SEQ ID NO: 656 - DNA, 16 bp, Artificial sequence
  Synthetic oligonucleotide
acagtgactccacccg

SEQ ID NO: 657 - DNA, 16 bp, Artificial sequence
  Synthetic oligonucleotide
gcaccatatcaaggtg

SEQ ID NO: 658 - DNA, 16 bp, Artificial sequence
  Synthetic oligonucleotide
ggtggctgttcaccaa

SEQ ID NO: 659 - DNA, 16 bp, Artificial sequence
  Synthetic oligonucleotide
cacaatctccgaatgt

SEQ ID NO: 660 - DNA, 16 bp, Artificial sequence
  Synthetic oligonucleotide
ttcagattgcacaaca

SEQ ID NO: 661 - DNA, 16 bp, Artificial sequence
  Synthetic oligonucleotide
tactgatgcaagatcc

SEQ ID NO: 662 - DNA, 16 bp, Artificial sequence
  Synthetic oligonucleotide
ggcattctcccccaca

SEQ ID NO: 663 - DNA, 16 bp, Artificial sequence
  Synthetic oligonucleotide
ctgcaggttacactgt

SEQ ID NO: 664 - DNA, 16 bp, Artificial sequence
  Synthetic oligonucleotide
ctgagtaccgaggaca

SEQ ID NO: 665 - DNA, 16 bp, Artificial sequence
  Synthetic oligonucleotide
gagtgttgcctcgcag

SEQ ID NO: 666 - DNA, 16 bp, Artificial sequence
  Synthetic oligonucleotide
acacctgaagcttgca

SEQ ID NO: 667 - DNA, 16 bp, Artificial sequence
  Synthetic oligonucleotide
caggtcattgttgccc

SEQ ID NO: 668 - DNA, 16 bp, Artificial sequence
  Synthetic oligonucleotide
ctcctaccaagaaggc

SEQ ID NO: 669 - DNA, 16 bp, Artificial sequence
  Synthetic oligonucleotide
aaggagatgcccaagc

SEQ ID NO: 670 - DNA, 16 bp, Artificial sequence
  Synthetic oligonucleotide
gctaattacatgaggt

SEQ ID NO: 671 - DNA, 16 bp, Artificial sequence
  Synthetic oligonucleotide
tctgtgttatggtcag

SEQ ID NO: 672 - DNA, 16 bp, Artificial sequence
  Synthetic oligonucleotide
caccaaccagagcttc

SEQ ID NO: 673 - DNA, 16 bp, Artificial sequence
  Synthetic oligonucleotide
agggaattccgacaca

SEQ ID NO: 674 - DNA, 16 bp, Artificial sequence
  Synthetic oligonucleotide
ctaatcatggcaggtg

SEQ ID NO: 675 - DNA, 16 bp, Artificial sequence
  Synthetic oligonucleotide
ataataccagaagctg

SEQ ID NO: 676 - DNA, 16 bp, Artificial sequence
  Synthetic oligonucleotide
catatcttaagaaggc

SEQ ID NO: 677 - DNA, 16 bp, Artificial sequence
  Synthetic oligonucleotide
tgcattatctgaacct

SEQ ID NO: 678 - DNA, 16 bp, Artificial sequence
  Synthetic oligonucleotide
tatgatgtagctgtgg

SEQ ID NO: 679 - DNA, 16 bp, Artificial sequence
  Synthetic oligonucleotide
cataccagtcttcagt

SEQ ID NO: 680 - DNA, 16 bp, Artificial sequence
  Synthetic oligonucleotide
gtgctgagcctcctac

SEQ ID NO: 681 - DNA, 16 bp, Artificial sequence
  Synthetic oligonucleotide
ccccctaccagggctc

SEQ ID NO: 682 - DNA, 16 bp, Artificial sequence
  Synthetic oligonucleotide
tcctcagagtaaggca

SEQ ID NO: 683 - DNA, 16 bp, Artificial sequence
  Synthetic oligonucleotide
ctgccagggctccaat

SEQ ID NO: 684 - DNA, 16 bp, Artificial sequence
  Synthetic oligonucleotide
aacattaggtcttgtg

SEQ ID NO: 685 - DNA, 16 bp, Artificial sequence
  Synthetic oligonucleotide
gcaaaatgtcctagag

SEQ ID NO: 686 - DNA, 16 bp, Artificial sequence
  Synthetic oligonucleotide
caaatggatctctact

SEQ ID NO: 687 - DNA, 16 bp, Artificial sequence
  Synthetic oligonucleotide
cggaatacagcacaag

SEQ ID NO: 688 - DNA, 16 bp, Artificial sequence
  Synthetic oligonucleotide
cggaatagagaaagca

SEQ ID NO: 689 - DNA, 16 bp, Artificial sequence
  Synthetic oligonucleotide
atacaatatgaggacc

SEQ ID NO: 690 - DNA, 16 bp, Artificial sequence
  Synthetic oligonucleotide
acaattaatggcctta

SEQ ID NO: 691 - DNA, 16 bp, Artificial sequence
  Synthetic oligonucleotide
tacattatatgcctcc

SEQ ID NO: 692 - DNA, 16 bp, Artificial sequence
  Synthetic oligonucleotide
cataggtgaaggtgct

SEQ ID NO: 693 - DNA, 16 bp, Artificial sequence
  Synthetic oligonucleotide
cctatagcatctttct

SEQ ID NO: 694 - DNA, 16 bp, Artificial sequence
  Synthetic oligonucleotide
ggtaagatgaggttta

SEQ ID NO: 695 - DNA, 16 bp, Artificial sequence
  Synthetic oligonucleotide
aagggtaataccctaa

SEQ ID NO: 696 - DNA, 16 bp, Artificial sequence
  Synthetic oligonucleotide
gtttaggccgctctgt

SEQ ID NO: 697 - DNA, 16 bp, Artificial sequence
  Synthetic oligonucleotide
acggatggaaaataga

SEQ ID NO: 698 - DNA, 16 bp, Artificial sequence
  Synthetic oligonucleotide
gataaaggcaatggtg

SEQ ID NO: 699 - DNA, 16 bp, Artificial sequence
  Synthetic oligonucleotide
gggatattatgcccca

SEQ ID NO: 700 - DNA, 16 bp, Artificial sequence
  Synthetic oligonucleotide
acaatatgcagccaga

SEQ ID NO: 701 - DNA, 16 bp, Artificial sequence
  Synthetic oligonucleotide
gatgagatcaggcact

SEQ ID NO: 702 - DNA, 16 bp, Artificial sequence
  Synthetic oligonucleotide
ctcgatttcaaccaat

SEQ ID NO: 703 - DNA, 16 bp, Artificial sequence
  Synthetic oligonucleotide
taaagttatgcaggct

SEQ ID NO: 704 - DNA, 16 bp, Artificial sequence
  Synthetic oligonucleotide
gtaaagcatgaacaga

SEQ ID NO: 705 - DNA, 16 bp, Artificial sequence
  Synthetic oligonucleotide
accttttagtctcatc

SEQ ID NO: 706 - DNA, 16 bp, Artificial sequence
  Synthetic oligonucleotide
ctaagatacagattat

SEQ ID NO: 707 - DNA, 16 bp, Artificial sequence
  Synthetic oligonucleotide
cttaaccatcccccta

SEQ ID NO: 708 - DNA, 16 bp, Artificial sequence
  Synthetic oligonucleotide
agtgataagaagacga

SEQ ID NO: 709 - DNA, 16 bp, Artificial sequence
  Synthetic oligonucleotide
tgggaatattggcttg

SEQ ID NO: 710 - DNA, 16 bp, Artificial sequence
  Synthetic oligonucleotide
taacaagaaggtagcc

SEQ ID NO: 711 - DNA, 16 bp, Artificial sequence
  Synthetic oligonucleotide
atgaagcccgaacccc

SEQ ID NO: 712 - DNA, 16 bp, Artificial sequence
  Synthetic oligonucleotide
tcatttagtcactaac

SEQ ID NO: 713 - DNA, 16 bp, Artificial sequence
  Synthetic oligonucleotide
aacagtttgcctccac

SEQ ID NO: 714 - DNA, 16 bp, Artificial sequence
  Synthetic oligonucleotide
tattcctcaacttcag

SEQ ID NO: 715 - DNA, 16 bp, Artificial sequence
  Synthetic oligonucleotide
acttcacgatgccatc

SEQ ID NO: 716 - DNA, 16 bp, Artificial sequence
  Synthetic oligonucleotide
atccaggagtgtgtcc

SEQ ID NO: 717 - DNA, 16 bp, Artificial sequence
  Synthetic oligonucleotide
ccactttgagagatat

SEQ ID NO: 718 - DNA, 16 bp, Artificial sequence
  Synthetic oligonucleotide
ggtccttaggcttcgg

SEQ ID NO: 719 - DNA, 16 bp, Artificial sequence
  Synthetic oligonucleotide
ggatgcagcccttctg

SEQ ID NO: 720 - DNA, 16 bp, Artificial sequence
  Synthetic oligonucleotide
cctccccattgaagtc

SEQ ID NO: 721 - DNA, 16 bp, Artificial sequence
  Synthetic oligonucleotide
tctcctgttgatcgca

SEQ ID NO: 722 - DNA, 16 bp, Artificial sequence
  Synthetic oligonucleotide
atcacagtgggattcg

SEQ ID NO: 723 - DNA, 16 bp, Artificial sequence
  Synthetic oligonucleotide
ttacggtaatctttct

SEQ ID NO: 724 - DNA, 16 bp, Artificial sequence
  Synthetic oligonucleotide
cctgtcttcaatgcac

SEQ ID NO: 725 - DNA, 16 bp, Artificial sequence
  Synthetic oligonucleotide
caccacggtgtgcaca

SEQ ID NO: 726 - DNA, 16 bp, Artificial sequence
  Synthetic oligonucleotide
cacgatcttgtggatg

SEQ ID NO: 727 - DNA, 16 bp, Artificial sequence
  Synthetic oligonucleotide
ctgatgaggctgctca

SEQ ID NO: 728 - DNA, 16 bp, Artificial sequence
  Synthetic oligonucleotide
ggatgtctgggcaagg

SEQ ID NO: 729 - DNA, 16 bp, Artificial sequence
  Synthetic oligonucleotide
aggttcatcctcagga

SEQ ID NO: 730 - DNA, 16 bp, Artificial sequence
  Synthetic oligonucleotide
caaataccccttttcg

SEQ ID NO: 731 - DNA, 16 bp, Artificial sequence
  Synthetic oligonucleotide
gagatcttgcaactta

SEQ ID NO: 732 - DNA, 16 bp, Artificial sequence
  Synthetic oligonucleotide
ctttgcacgaagtcct

SEQ ID NO: 733 - DNA, 16 bp, Artificial sequence
  Synthetic oligonucleotide
gacagtgactccaccc

SEQ ID NO: 734 - DNA, 16 bp, Artificial sequence
  Synthetic oligonucleotide
tgcaccatatcaaggt

SEQ ID NO: 735 - DNA, 16 bp, Artificial sequence
  Synthetic oligonucleotide
tgaggtggctgttcac

SEQ ID NO: 736 - DNA, 16 bp, Artificial sequence
  Synthetic oligonucleotide
ccacaatctccgaatg

SEQ ID NO: 737 - DNA, 16 bp, Artificial sequence
  Synthetic oligonucleotide
caaccagagcttcttc

SEQ ID NO: 738 - DNA, 16 bp, Artificial sequence
  Synthetic oligonucleotide
atactgatgcaagatc

SEQ ID NO: 739 - DNA, 16 bp, Artificial sequence
  Synthetic oligonucleotide
aggcattctcccccac

SEQ ID NO: 740 - DNA, 16 bp, Artificial sequence
  Synthetic oligonucleotide
tttctgcaggttacac

SEQ ID NO: 741 - DNA, 16 bp, Artificial sequence
  Synthetic oligonucleotide
gctgagtaccgaggac

SEQ ID NO: 742 - DNA, 16 bp, Artificial sequence
  Synthetic oligonucleotide
agagtgttgcctcgca

SEQ ID NO: 743 - DNA, 16 bp, Artificial sequence
  Synthetic oligonucleotide
caacacctgaagcttg

SEQ ID NO: 744 - DNA, 16 bp, Artificial sequence
  Synthetic oligonucleotide
ccaggtcattgttgcc

SEQ ID NO: 745 - DNA, 16 bp, Artificial sequence
  Synthetic oligonucleotide
cactcctaccaagaag

SEQ ID NO: 746 - DNA, 16 bp, Artificial sequence
  Synthetic oligonucleotide
tgtcctggtgtcttcc

SEQ ID NO: 747 - DNA, 16 bp, Artificial sequence
  Synthetic oligonucleotide
agctaattacatgagg

SEQ ID NO: 748 - DNA, 16 bp, Artificial sequence
  Synthetic oligonucleotide
ttctgtgttatggtca

SEQ ID NO: 749 - DNA, 16 bp, Artificial sequence
  Synthetic oligonucleotide
attcaccaaccagagc

SEQ ID NO: 750 - DNA, 16 bp, Artificial sequence
  Synthetic oligonucleotide
gagtatttatacagtc

SEQ ID NO: 751 - DNA, 16 bp, Artificial sequence
  Synthetic oligonucleotide
tcagataaagagggac

SEQ ID NO: 752 - DNA, 16 bp, Artificial sequence
  Synthetic oligonucleotide
gagggataataccaga

SEQ ID NO: 753 - DNA, 16 bp, Artificial sequence
  Synthetic oligonucleotide
gcatatcttaagaagg

SEQ ID NO: 754 - DNA, 16 bp, Artificial sequence
  Synthetic oligonucleotide
tcaactagaagcacca

SEQ ID NO: 755 - DNA, 16 bp, Artificial sequence
  Synthetic oligonucleotide
cattatgatgtagctg

SEQ ID NO: 756 - DNA, 16 bp, Artificial sequence
  Synthetic oligonucleotide
catgatttggctcata

SEQ ID NO: 757 - DNA, 16 bp, Artificial sequence
  Synthetic oligonucleotide
ggtgctgagcctccta

SEQ ID NO: 758 - DNA, 16 bp, Artificial sequence
  Synthetic oligonucleotide
gccccctaccagggct

SEQ ID NO: 759 - DNA, 16 bp, Artificial sequence
  Synthetic oligonucleotide
gtcctcagagtaaggc

SEQ ID NO: 760 - DNA, 16 bp, Artificial sequence
  Synthetic oligonucleotide
aatgggtgctgagccc

SEQ ID NO: 761 - DNA, 16 bp, Artificial sequence
  Synthetic oligonucleotide
agattaacattaggtc

SEQ ID NO: 762 - DNA, 16 bp, Artificial sequence
  Synthetic oligonucleotide
caaaccccatccccgg

SEQ ID NO: 763 - DNA, 16 bp, Artificial sequence
  Synthetic oligonucleotide
acaaatggatctctac

SEQ ID NO: 764 - DNA, 16 bp, Artificial sequence
  Synthetic oligonucleotide
ccggaatacagcacaa

SEQ ID NO: 765 - DNA, 16 bp, Artificial sequence
  Synthetic oligonucleotide
agagctccggaataga

SEQ ID NO: 766 - DNA, 16 bp, Artificial sequence
  Synthetic oligonucleotide
tatacaatatgaggac

SEQ ID NO: 767 - DNA, 16 bp, Artificial sequence
  Synthetic oligonucleotide
gcacaattaatggcct

SEQ ID NO: 768 - DNA, 16 bp, Artificial sequence
  Synthetic oligonucleotide
gtatacattatatgcc

SEQ ID NO: 769 - DNA, 16 bp, Artificial sequence
  Synthetic oligonucleotide
acataggtgaaggtgc

SEQ ID NO: 770 - DNA, 16 bp, Artificial sequence
  Synthetic oligonucleotide
taccctatagcatctt

SEQ ID NO: 771 - DNA, 16 bp, Artificial sequence
  Synthetic oligonucleotide
caggtaagatgaggtt

SEQ ID NO: 772 - DNA, 16 bp, Artificial sequence
  Synthetic oligonucleotide
gaagggtaatacccta

SEQ ID NO: 773 - DNA, 16 bp, Artificial sequence
  Synthetic oligonucleotide
ggcaataaactcttgt

SEQ ID NO: 774 - DNA, 16 bp, Artificial sequence
  Synthetic oligonucleotide
gatactcccttggatg

SEQ ID NO: 775 - DNA, 16 bp, Artificial sequence
  Synthetic oligonucleotide
ctaacatgacttgtgt

SEQ ID NO: 776 - DNA, 16 bp, Artificial sequence
  Synthetic oligonucleotide
atgggatattatgccc

SEQ ID NO: 777 - DNA, 16 bp, Artificial sequence
  Synthetic oligonucleotide
cacaatatgcagccag

SEQ ID NO: 778 - DNA, 16 bp, Artificial sequence
  Synthetic oligonucleotide
ctaattcatagctggg

SEQ ID NO: 779 - DNA, 16 bp, Artificial sequence
  Synthetic oligonucleotide
gaggaatgtgattgac

SEQ ID NO: 780 - DNA, 16 bp, Artificial sequence
  Synthetic oligonucleotide
ttaaagttatgcaggc

SEQ ID NO: 781 - DNA, 16 bp, Artificial sequence
  Synthetic oligonucleotide
agtaaagcatgaacag

SEQ ID NO: 782 - DNA, 16 bp, Artificial sequence
  Synthetic oligonucleotide
caccttttagtctcat

SEQ ID NO: 783 - DNA, 16 bp, Artificial sequence
  Synthetic oligonucleotide
taagaagacacctcac

SEQ ID NO: 784 - DNA, 16 bp, Artificial sequence
  Synthetic oligonucleotide
ccttaaccatccccct

SEQ ID NO: 785 - DNA, 16 bp, Artificial sequence
  Synthetic oligonucleotide
catgagtttgttgctc

SEQ ID NO: 786 - DNA, 16 bp, Artificial sequence
  Synthetic oligonucleotide
accaatcctttgtttg

SEQ ID NO: 787 - DNA, 16 bp, Artificial sequence
  Synthetic oligonucleotide
ataacaagaaggtagc

SEQ ID NO: 788 - DNA, 16 bp, Artificial sequence
  Synthetic oligonucleotide
gatgaagcccgaaccc

SEQ ID NO: 789 - DNA, 16 bp, Artificial sequence
  Synthetic oligonucleotide
gttcatttagtcacta

SEQ ID NO: 790 - DNA, 16 bp, Artificial sequence
  Synthetic oligonucleotide
cccactatgtaaagac

SEQ ID NO: 791 - DNA, 16 bp, Artificial sequence
  Synthetic oligonucleotide
ttcactattcctcaac

SEQ ID NO: 792 - DNA, 16 bp, Artificial sequence
  Synthetic oligonucleotide
accacttcacgatgcc

SEQ ID NO: 793 - DNA, 16 bp, Artificial sequence
  Synthetic oligonucleotide
gatccaggagtgtgtc

SEQ ID NO: 794 - DNA, 16 bp, Artificial sequence
  Synthetic oligonucleotide
tccactttgagagata

SEQ ID NO: 795 - DNA, 16 bp, Artificial sequence
  Synthetic oligonucleotide
agggtccttaggcttc

SEQ ID NO: 796 - DNA, 16 bp, Artificial sequence
  Synthetic oligonucleotide
gggatgcagcccttct

SEQ ID NO: 797 - DNA, 16 bp, Artificial sequence
  Synthetic oligonucleotide
tcctccccattgaagt

SEQ ID NO: 798 - DNA, 16 bp, Artificial sequence
  Synthetic oligonucleotide
ctctcctgttgatcgc

SEQ ID NO: 799 - DNA, 16 bp, Artificial sequence
  Synthetic oligonucleotide
catatcacagtgggat

SEQ ID NO: 800 - DNA, 16 bp, Artificial sequence
  Synthetic oligonucleotide
cttacggtaatctttc

SEQ ID NO: 801 - DNA, 16 bp, Artificial sequence
  Synthetic oligonucleotide
tcctgtcttcaatgca

SEQ ID NO: 802 - DNA, 16 bp, Artificial sequence
  Synthetic oligonucleotide
ctggaacaccacggtg

SEQ ID NO: 803 - DNA, 16 bp, Artificial sequence
  Synthetic oligonucleotide
tcacgatcttgtggat

SEQ ID NO: 804 - DNA, 16 bp, Artificial sequence
  Synthetic oligonucleotide
gagcagagaggcctcg

SEQ ID NO: 805 - DNA, 16 bp, Artificial sequence
  Synthetic oligonucleotide
tggatgtctgggcaag

SEQ ID NO: 806 - DNA, 16 bp, Artificial sequence
  Synthetic oligonucleotide
acaggttcatcctcag

SEQ ID NO: 807 - DNA, 16 bp, Artificial sequence
  Synthetic oligonucleotide
atcaaatacccctttt

SEQ ID NO: 808 - DNA, 16 bp, Artificial sequence
  Synthetic oligonucleotide
agagatcttgcaactt

SEQ ID NO: 809 - DNA, 16 bp, Artificial sequence
  Synthetic oligonucleotide
cctttgcacgaagtcc

SEQ ID NO: 810 - DNA, 16 bp, Artificial sequence
  Synthetic oligonucleotide
accccagggacagtga

SEQ ID NO: 811 - DNA, 16 bp, Artificial sequence
  Synthetic oligonucleotide
ctgcaccatatcaagg

SEQ ID NO: 812 - DNA, 16 bp, Artificial sequence
  Synthetic oligonucleotide
aagtgaggtggctgtt

SEQ ID NO: 813 - DNA, 16 bp, Artificial sequence
  Synthetic oligonucleotide
accacaatctccgaat

SEQ ID NO: 814 - DNA, 16 bp, Artificial sequence
  Synthetic oligonucleotide
gaccaaccagagcttc

SEQ ID NO: 815 - DNA, 16 bp, Artificial sequence
  Synthetic oligonucleotide
gctcaatactgatgca

SEQ ID NO: 816 - DNA, 16 bp, Artificial sequence
  Synthetic oligonucleotide
caaggcattctccccc

SEQ ID NO: 817 - DNA, 16 bp, Artificial sequence
  Synthetic oligonucleotide
gtttctgcaggttaca

SEQ ID NO: 818 - DNA, 16 bp, Artificial sequence
  Synthetic oligonucleotide
tgctgagtaccgagga

SEQ ID NO: 819 - DNA, 16 bp, Artificial sequence
  Synthetic oligonucleotide
cgagagtgttgcctcg

SEQ ID NO: 820 - DNA, 16 bp, Artificial sequence
  Synthetic oligonucleotide
ccaacacctgaagctt

SEQ ID NO: 821 - DNA, 16 bp, Artificial sequence
  Synthetic oligonucleotide
cccaggtcattgttgc

SEQ ID NO: 822 - DNA, 16 bp, Artificial sequence
  Synthetic oligonucleotide
cgtttccactcctacc

SEQ ID NO: 823 - DNA, 16 bp, Artificial sequence
  Synthetic oligonucleotide
gtcattgtcctggtgt

SEQ ID NO: 824 - DNA, 16 bp, Artificial sequence
  Synthetic oligonucleotide
gagctaattacatgag

SEQ ID NO: 825 - DNA, 16 bp, Artificial sequence
  Synthetic oligonucleotide
gttctgtgttatggtc

SEQ ID NO: 826 - DNA, 16 bp, Artificial sequence
  Synthetic oligonucleotide
aattcaccaaccagag

SEQ ID NO: 827 - DNA, 16 bp, Artificial sequence
  Synthetic oligonucleotide
atatggtaccatggag

SEQ ID NO: 828 - DNA, 16 bp, Artificial sequence
  Synthetic oligonucleotide
ggattaagagaatttc

SEQ ID NO: 829 - DNA, 16 bp, Artificial sequence
  Synthetic oligonucleotide
agttaggatctcttcc

SEQ ID NO: 830 - DNA, 16 bp, Artificial sequence
  Synthetic oligonucleotide
gatagcatatcttaag

SEQ ID NO: 831 - DNA, 16 bp, Artificial sequence
  Synthetic oligonucleotide
tatagtatggccaagt

SEQ ID NO: 832 - DNA, 16 bp, Artificial sequence
  Synthetic oligonucleotide
ggcattatgatgtagc

SEQ ID NO: 833 - DNA, 16 bp, Artificial sequence
  Synthetic oligonucleotide
ccaaggaaactgtgtc

SEQ ID NO: 834 - DNA, 16 bp, Artificial sequence
  Synthetic oligonucleotide
atgggtgctgagcctc

SEQ ID NO: 835 - DNA, 16 bp, Artificial sequence
  Synthetic oligonucleotide
gagccccctaccaggg

SEQ ID NO: 836 - DNA, 16 bp, Artificial sequence
  Synthetic oligonucleotide
tgtcctcagagtaagg

SEQ ID NO: 837 - DNA, 16 bp, Artificial sequence
  Synthetic oligonucleotide
aaatggttgctgagcc

SEQ ID NO: 838 - DNA, 16 bp, Artificial sequence
  Synthetic oligonucleotide
tagattaacattaggt

SEQ ID NO: 839 - DNA, 16 bp, Artificial sequence
  Synthetic oligonucleotide
cgcaaaccccatcccc

SEQ ID NO: 840 - DNA, 16 bp, Artificial sequence
  Synthetic oligonucleotide
gacaaatggatctcta

SEQ ID NO: 841 - DNA, 16 bp, Artificial sequence
  Synthetic oligonucleotide
gagagctccggaatac

SEQ ID NO: 842 - DNA, 16 bp, Artificial sequence
  Synthetic oligonucleotide
gagagctccggaatag

SEQ ID NO: 843 - DNA, 16 bp, Artificial sequence
  Synthetic oligonucleotide
cttatacaatatgagg

SEQ ID NO: 844 - DNA, 16 bp, Artificial sequence
  Synthetic oligonucleotide
atactacatcttccca

SEQ ID NO: 845 - DNA, 16 bp, Artificial sequence
  Synthetic oligonucleotide
cttattagcagcagta

SEQ ID NO: 846 - DNA, 16 bp, Artificial sequence
  Synthetic oligonucleotide
tacataggtgaaggtg

SEQ ID NO: 847 - DNA, 16 bp, Artificial sequence
  Synthetic oligonucleotide
aagttatgaggctccc

SEQ ID NO: 848 - DNA, 16 bp, Artificial sequence
  Synthetic oligonucleotide
ttcaaaactgcctagt

SEQ ID NO: 849 - DNA, 16 bp, Artificial sequence
  Synthetic oligonucleotide
aggaagggtaataccc

SEQ ID NO: 850 - DNA, 16 bp, Artificial sequence
  Synthetic oligonucleotide
aggcaataaactcttg

SEQ ID NO: 851 - DNA, 16 bp, Artificial sequence
  Synthetic oligonucleotide
ccaatatatgttcaca

SEQ ID NO: 852 - DNA, 16 bp, Artificial sequence
  Synthetic oligonucleotide
aatctaacatgacttg

SEQ ID NO: 853 - DNA, 16 bp, Artificial sequence
  Synthetic oligonucleotide
atggtaaagcacacta

SEQ ID NO: 854 - DNA, 16 bp, Artificial sequence
  Synthetic oligonucleotide
gtattgagacaggcag

SEQ ID NO: 855 - DNA, 16 bp, Artificial sequence
  Synthetic oligonucleotide
caccaagatgtttcaa

SEQ ID NO: 856 - DNA, 16 bp, Artificial sequence
  Synthetic oligonucleotide
caatccttggattaga

SEQ ID NO: 857 - DNA, 16 bp, Artificial sequence
  Synthetic oligonucleotide
attaaagttatgcagg

SEQ ID NO: 858 - DNA, 16 bp, Artificial sequence
  Synthetic oligonucleotide
acagtaaagcatgaac

SEQ ID NO: 859 - DNA, 16 bp, Artificial sequence
  Synthetic oligonucleotide
gaaatctaaggcttat

SEQ ID NO: 860 - DNA, 16 bp, Artificial sequence
  Synthetic oligonucleotide
ctaagaagacacctca

SEQ ID NO: 861 - DNA, 16 bp, Artificial sequence
  Synthetic oligonucleotide
gattttgataacagtc

SEQ ID NO: 862 - DNA, 16 bp, Artificial sequence
  Synthetic oligonucleotide
cagaataagcaagggt

SEQ ID NO: 863 - DNA, 16 bp, Artificial sequence
  Synthetic oligonucleotide
gaccaatcctttgttt

SEQ ID NO: 864 - DNA, 16 bp, Artificial sequence
  Synthetic oligonucleotide
cataacaagaaggtag

SEQ ID NO: 865 - DNA, 16 bp, Artificial sequence
  Synthetic oligonucleotide
catgatgaagcccgaa

SEQ ID NO: 866 - DNA, 16 bp, Artificial sequence
  Synthetic oligonucleotide
catttacgcttcctca

SEQ ID NO: 867 - DNA, 16 bp, Artificial sequence
  Synthetic oligonucleotide
gaggcatctacaggtc

SEQ ID NO: 868 - DNA, 16 bp, Artificial sequence
  Synthetic oligonucleotide
ctcgcagtccacttcc

SEQ ID NO: 869 - DNA, 16 bp, Artificial sequence
  Synthetic oligonucleotide
tgagagatcttgcaac

SEQ ID NO: 870 - DNA, 16 bp, Artificial sequence
  Synthetic oligonucleotide
aactcttcactattcc

SEQ ID NO: 871 - DNA, 16 bp, Artificial sequence
  Synthetic oligonucleotide
aaccacttcacgatgc

SEQ ID NO: 872 - DNA, 16 bp, Artificial sequence
  Synthetic oligonucleotide
tcgatccaggagtgtg

SEQ ID NO: 873 - DNA, 16 bp, Artificial sequence
  Synthetic oligonucleotide
ctccactttgagagat

SEQ ID NO: 874 - DNA, 16 bp, Artificial sequence
  Synthetic oligonucleotide
cagggtccttaggctt

SEQ ID NO: 875 - DNA, 16 bp, Artificial sequence
  Synthetic oligonucleotide
ctgacccctcgggagg

SEQ ID NO: 876 - DNA, 16 bp, Artificial sequence
  Synthetic oligonucleotide
tctcctccccattgaa

SEQ ID NO: 877 - DNA, 16 bp, Artificial sequence
  Synthetic oligonucleotide
tctctcctgttgatcg

SEQ ID NO: 878 - DNA, 16 bp, Artificial sequence
  Synthetic oligonucleotide
gcatatcacagtggga

SEQ ID NO: 879 - DNA, 16 bp, Artificial sequence
  Synthetic oligonucleotide
tcttacggtaatcttt

SEQ ID NO: 880 - DNA, 16 bp, Artificial sequence
  Synthetic oligonucleotide
acgggcattcctgtct

SEQ ID NO: 881 - DNA, 16 bp, Artificial sequence
  Synthetic oligonucleotide
cccctggaacaccacg

SEQ ID NO: 882 - DNA, 16 bp, Artificial sequence
  Synthetic oligonucleotide
tctcacgatcttgtgg

SEQ ID NO: 883 - DNA, 16 bp, Artificial sequence
  Synthetic oligonucleotide
cagggccacaggtctc

SEQ ID NO: 884 - DNA, 16 bp, Artificial sequence
  Synthetic oligonucleotide
gcagaggccgtgctcc

SEQ ID NO: 885 - DNA, 16 bp, Artificial sequence
  Synthetic oligonucleotide
aatcaaataccccttt

SEQ ID NO: 886 - DNA, 16 bp, Artificial sequence
  Synthetic oligonucleotide
catggccctttgcacg

SEQ ID NO: 887 - DNA, 16 bp, Artificial sequence
  Synthetic oligonucleotide
gttatggagaaacccc

SEQ ID NO: 888 - DNA, 16 bp, Artificial sequence
  Synthetic oligonucleotide
cactgcaccatatcaa

SEQ ID NO: 889 - DNA, 16 bp, Artificial sequence
  Synthetic oligonucleotide
gaagtgaggtggctgt

SEQ ID NO: 890 - DNA, 16 bp, Artificial sequence
  Synthetic oligonucleotide
aaccacaatctccgaa

SEQ ID NO: 891 - DNA, 16 bp, Artificial sequence
  Synthetic oligonucleotide
gcagcagctgaccaac

SEQ ID NO: 892 - DNA, 16 bp, Artificial sequence
  Synthetic oligonucleotide
tgctcaatactgatgc

SEQ ID NO: 893 - DNA, 16 bp, Artificial sequence
  Synthetic oligonucleotide
ctcccaaggcattctc

SEQ ID NO: 894 - DNA, 16 bp, Artificial sequence
  Synthetic oligonucleotide
agtttctgcaggttac

SEQ ID NO: 895 - DNA, 16 bp, Artificial sequence
  Synthetic oligonucleotide
gtgctgagtaccgagg

SEQ ID NO: 896 - DNA, 16 bp, Artificial sequence
  Synthetic oligonucleotide
ccgagagtgttgcctc

SEQ ID NO: 897 - DNA, 16 bp, Artificial sequence
  Synthetic oligonucleotide
ttccaacacctgaagc

SEQ ID NO: 898 - DNA, 16 bp, Artificial sequence
  Synthetic oligonucleotide
gcccaggtcattgttg

SEQ ID NO: 899 - DNA, 16 bp, Artificial sequence
  Synthetic oligonucleotide
ccgtttccactcctac

SEQ ID NO: 900 - DNA, 16 bp, Artificial sequence
  Synthetic oligonucleotide
tgtcattgtcctggtg

SEQ ID NO: 901 - DNA, 16 bp, Artificial sequence
  Synthetic oligonucleotide
ctttattgaatgagct

SEQ ID NO: 902 - DNA, 16 bp, Artificial sequence
  Synthetic oligonucleotide
agttctgtgttatggt

SEQ ID NO: 903 - DNA, 16 bp, Artificial sequence
  Synthetic oligonucleotide
gaattcaccaaccaga

SEQ ID NO: 904 - DNA, 16 bp, Artificial sequence
  Synthetic oligonucleotide
tatatggtaccatgga

SEQ ID NO: 905 - DNA, 16 bp, Artificial sequence
  Synthetic oligonucleotide
gggattaagagaattt

SEQ ID NO: 906 - DNA, 16 bp, Artificial sequence
  Synthetic oligonucleotide
ccagttaggatctctt

SEQ ID NO: 907 - DNA, 16 bp, Artificial sequence
  Synthetic oligonucleotide
ctagatagcatatctt

SEQ ID NO: 908 - DNA, 16 bp, Artificial sequence
  Synthetic oligonucleotide
ctatagtatggccaag

SEQ ID NO: 909 - DNA, 16 bp, Artificial sequence
  Synthetic oligonucleotide
tggcattatgatgtag

SEQ ID NO: 910 - DNA, 16 bp, Artificial sequence
  Synthetic oligonucleotide
ctctatttcccttgat

SEQ ID NO: 911 - DNA, 16 bp, Artificial sequence
  Synthetic oligonucleotide
aatgggtgctgagcct

SEQ ID NO: 912 - DNA, 16 bp, Artificial sequence
  Synthetic oligonucleotide
tgagccccctaccagg

SEQ ID NO: 913 - DNA, 16 bp, Artificial sequence
  Synthetic oligonucleotide
ctgtcctcagagtaag

SEQ ID NO: 914 - DNA, 16 bp, Artificial sequence
  Synthetic oligonucleotide
cagtcagagtctgtcc

SEQ ID NO: 915 - DNA, 16 bp, Artificial sequence
  Synthetic oligonucleotide
ctagattaacattagg

SEQ ID NO: 916 - DNA, 16 bp, Artificial sequence
  Synthetic oligonucleotide
caagacaaacaaacgc

SEQ ID NO: 917 - DNA, 16 bp, Artificial sequence
  Synthetic oligonucleotide
cctgttagaccacctt

SEQ ID NO: 918 - DNA, 16 bp, Artificial sequence
  Synthetic oligonucleotide
cagagagctccggaat

SEQ ID NO: 919 - DNA, 16 bp, Artificial sequence
  Synthetic oligonucleotide
tagagaatgcatcagg

SEQ ID NO: 920 - DNA, 16 bp, Artificial sequence
  Synthetic oligonucleotide
atcgagggtctgcatt

SEQ ID NO: 921 - DNA, 16 bp, Artificial sequence
  Synthetic oligonucleotide
caatactacatcttcc

SEQ ID NO: 922 - DNA, 16 bp, Artificial sequence
  Synthetic oligonucleotide
ttatcttattagcagc

SEQ ID NO: 923 - DNA, 16 bp, Artificial sequence
  Synthetic oligonucleotide
gctacataggtgaagg

SEQ ID NO: 924 - DNA, 16 bp, Artificial sequence
  Synthetic oligonucleotide
aaagttatgaggctcc

SEQ ID NO: 925 - DNA, 16 bp, Artificial sequence
  Synthetic oligonucleotide
gattcaaaactgccta

SEQ ID NO: 926 - DNA, 16 bp, Artificial sequence
  Synthetic oligonucleotide
agtaatattctaaggc

SEQ ID NO: 927 - DNA, 16 bp, Artificial sequence
  Synthetic oligonucleotide
taaagtaaggactggg

SEQ ID NO: 928 - DNA, 16 bp, Artificial sequence
  Synthetic oligonucleotide
cataattagcaaccaa

SEQ ID NO: 929 - DNA, 16 bp, Artificial sequence
  Synthetic oligonucleotide
caaatctaacatgact

SEQ ID NO: 930 - DNA, 16 bp, Artificial sequence
  Synthetic oligonucleotide
ttatggtaaagcacac

SEQ ID NO: 931 - DNA, 16 bp, Artificial sequence
  Synthetic oligonucleotide
gcagtattgagacagg

SEQ ID NO: 932 - DNA, 16 bp, Artificial sequence
  Synthetic oligonucleotide
gattaaaagaaccacc

SEQ ID NO: 933 - DNA, 16 bp, Artificial sequence
  Synthetic oligonucleotide
accaatccttggatta

SEQ ID NO: 934 - DNA, 16 bp, Artificial sequence
  Synthetic oligonucleotide
attctagtagaatggg

SEQ ID NO: 935 - DNA, 16 bp, Artificial sequence
  Synthetic oligonucleotide
aggaatagcgcaggtg

SEQ ID NO: 936 - DNA, 16 bp, Artificial sequence
  Synthetic oligonucleotide
cagctaaaactattac

SEQ ID NO: 937 - DNA, 16 bp, Artificial sequence
  Synthetic oligonucleotide
actaagaagacacctc

SEQ ID NO: 938 - DNA, 16 bp, Artificial sequence
  Synthetic oligonucleotide
ggattttgataacagt

SEQ ID NO: 939 - DNA, 16 bp, Artificial sequence
  Synthetic oligonucleotide
gcagaataagcaaggg

SEQ ID NO: 940 - DNA, 16 bp, Artificial sequence
  Synthetic oligonucleotide
atgtagcagtgtcccc

SEQ ID NO: 941 - DNA, 16 bp, Artificial sequence
  Synthetic oligonucleotide
gatatcagagagtttg

SEQ ID NO: 942 - DNA, 16 bp, Artificial sequence
  Synthetic oligonucleotide
ccatgatgaagcccga

SEQ ID NO: 943 - DNA, 16 bp, Artificial sequence
  Synthetic oligonucleotide
agcatttacgcttcct

SEQ ID NO: 944 - DNA, 16 bp, Artificial sequence
  Synthetic oligonucleotide
aaatgcatcaatctcg

SEQ ID NO: 945 - DNA, 16 bp, Artificial sequence
  Synthetic oligonucleotide
gacaaactcttcacta

SEQ ID NO: 946 - DNA, 16 bp, Artificial sequence
  Synthetic oligonucleotide
caaccacttcacgatg

SEQ ID NO: 947 - DNA, 16 bp, Artificial sequence
  Synthetic oligonucleotide
gttggctcgatccagg

SEQ ID NO: 948 - DNA, 16 bp, Artificial sequence
  Synthetic oligonucleotide
aagtctccactttgag

SEQ ID NO: 949 - DNA, 16 bp, Artificial sequence
  Synthetic oligonucleotide
tttcagggtccttagg

SEQ ID NO: 950 - DNA, 16 bp, Artificial sequence
  Synthetic oligonucleotide
tctgacccctcgggag

SEQ ID NO: 951 - DNA, 16 bp, Artificial sequence
  Synthetic oligonucleotide
gcccacgccttctcct

SEQ ID NO: 952 - DNA, 16 bp, Artificial sequence
  Synthetic oligonucleotide
aaggtctctcctgttg

SEQ ID NO: 953 - DNA, 16 bp, Artificial sequence
  Synthetic oligonucleotide
tggcatatcacagtgg

SEQ ID NO: 954 - DNA, 16 bp, Artificial sequence
  Synthetic oligonucleotide
ttcttacggtaatctt

SEQ ID NO: 955 - DNA, 16 bp, Artificial sequence
  Synthetic oligonucleotide
agacgggcattcctgt

SEQ ID NO: 956 - DNA, 16 bp, Artificial sequence
  Synthetic oligonucleotide
ccccctggaacaccac

SEQ ID NO: 957 - DNA, 16 bp, Artificial sequence
  Synthetic oligonucleotide
ttttctcacgatcttg

SEQ ID NO: 958 - DNA, 16 bp, Artificial sequence
  Synthetic oligonucleotide
caagtgctgcagtttc

SEQ ID NO: 959 - DNA, 16 bp, Artificial sequence
  Synthetic oligonucleotide
cgcagaggccgtgctc

SEQ ID NO: 960 - DNA, 16 bp, Artificial sequence
  Synthetic oligonucleotide
acttctcgcagtccac

SEQ ID NO: 961 - DNA, 16 bp, Artificial sequence
  Synthetic oligonucleotide
cgtacaacaaaaatca

SEQ ID NO: 962 - DNA, 16 bp, Artificial sequence
  Synthetic oligonucleotide
ctgagagatcttgcaa

SEQ ID NO: 963 - DNA, 16 bp, Artificial sequence
  Synthetic oligonucleotide
gtccatggccctttgc

SEQ ID NO: 964 - DNA, 16 bp, Artificial sequence
  Synthetic oligonucleotide
atgttatggagaaacc

SEQ ID NO: 965 - DNA, 16 bp, Artificial sequence
  Synthetic oligonucleotide
acactgcaccatatca

SEQ ID NO: 966 - DNA, 16 bp, Artificial sequence
  Synthetic oligonucleotide
tggaagtgaggtggct

SEQ ID NO: 967 - DNA, 16 bp, Artificial sequence
  Synthetic oligonucleotide
caaccacaatctccga

SEQ ID NO: 968 - DNA, 16 bp, Artificial sequence
  Synthetic oligonucleotide
ggcagcagctgaccaa

SEQ ID NO: 969 - DNA, 16 bp, Artificial sequence
  Synthetic oligonucleotide
gtgctcaatactgatg

SEQ ID NO: 970 - DNA, 16 bp, Artificial sequence
  Synthetic oligonucleotide
gtctcccaaggcattc

SEQ ID NO: 971 - DNA, 16 bp, Artificial sequence
  Synthetic oligonucleotide
cagtttctgcaggtta

SEQ ID NO: 972 - DNA, 16 bp, Artificial sequence
  Synthetic oligonucleotide
agtgctgagtaccgag

SEQ ID NO: 973 - DNA, 16 bp, Artificial sequence
  Synthetic oligonucleotide
gtctccgagagtgttg

SEQ ID NO: 974 - DNA, 16 bp, Artificial sequence
  Synthetic oligonucleotide
gtctaattccaacacc

SEQ ID NO: 975 - DNA, 16 bp, Artificial sequence
  Synthetic oligonucleotide
cgcccaggtcattgtt

SEQ ID NO: 976 - DNA, 16 bp, Artificial sequence
  Synthetic oligonucleotide
gggaccggagaacact

SEQ ID NO: 977 - DNA, 16 bp, Artificial sequence
  Synthetic oligonucleotide
gctgtcattgtcctgg

SEQ ID NO: 978 - DNA, 16 bp, Artificial sequence
  Synthetic oligonucleotide
gctttattgaatgagc

SEQ ID NO: 979 - DNA, 16 bp, Artificial sequence
  Synthetic oligonucleotide
tagttctgtgttatgg

SEQ ID NO: 980 - DNA, 16 bp, Artificial sequence
  Synthetic oligonucleotide
gctagagaggaaatgc

SEQ ID NO: 981 - DNA, 16 bp, Artificial sequence
  Synthetic oligonucleotide
gtatatggtaccatgg

SEQ ID NO: 982 - DNA, 16 bp, Artificial sequence
  Synthetic oligonucleotide
gaaagaaccttatccc

SEQ ID NO: 983 - DNA, 16 bp, Artificial sequence
  Synthetic oligonucleotide
ataaaccatgggccag

SEQ ID NO: 984 - DNA, 16 bp, Artificial sequence
  Synthetic oligonucleotide
actagatagcatatct

SEQ ID NO: 985 - DNA, 16 bp, Artificial sequence
  Synthetic oligonucleotide
cctatagtatggccaa

SEQ ID NO: 986 - DNA, 16 bp, Artificial sequence
  Synthetic oligonucleotide
atacatcaatctttgc

SEQ ID NO: 987 - DNA, 16 bp, Artificial sequence
  Synthetic oligonucleotide
ccacatttctgctcta

SEQ ID NO: 988 - DNA, 16 bp, Artificial sequence
  Synthetic oligonucleotide
tagagaaatgggtgct

SEQ ID NO: 989 - DNA, 16 bp, Artificial sequence
  Synthetic oligonucleotide
ctgagccccctaccag

SEQ ID NO: 990 - DNA, 16 bp, Artificial sequence
  Synthetic oligonucleotide
gtctgtcctcagagta

SEQ ID NO: 991 - DNA, 16 bp, Artificial sequence
  Synthetic oligonucleotide
ccagtcagagtctgtc

SEQ ID NO: 992 - DNA, 16 bp, Artificial sequence
  Synthetic oligonucleotide
actagattaacattag

SEQ ID NO: 993 - DNA, 16 bp, Artificial sequence
  Synthetic oligonucleotide
ctaagatgtctgtcca

SEQ ID NO: 994 - DNA, 16 bp, Artificial sequence
  Synthetic oligonucleotide
gttcataggtcctgga

SEQ ID NO: 995 - DNA, 16 bp, Artificial sequence
  Synthetic oligonucleotide
ccagagagctccggaa

SEQ ID NO: 996 - DNA, 16 bp, Artificial sequence
  Synthetic oligonucleotide
atagagaatgcatcag

SEQ ID NO: 997 - DNA, 16 bp, Artificial sequence
  Synthetic oligonucleotide
atacaacatcgagggt

SEQ ID NO: 998 - DNA, 16 bp, Artificial sequence
  Synthetic oligonucleotide
ccaatactacatcttc

SEQ ID NO: 999 - DNA, 16 bp, Artificial sequence
  Synthetic oligonucleotide
ctctagttctataatc

SEQ ID NO: 1000 - DNA, 16 bp, Artificial sequence
  Synthetic oligonucleotide
ctaacaaaccagcctg

SEQ ID NO: 1001 - DNA, 16 bp, Artificial sequence
  Synthetic oligonucleotide
caaagttatgaggctc

SEQ ID NO: 1002 - DNA, 16 bp, Artificial sequence
  Synthetic oligonucleotide
gatattattgtcagaa

SEQ ID NO: 1003 - DNA, 16 bp, Artificial sequence
  Synthetic oligonucleotide
gtcaaattgccaagga

SEQ ID NO: 1004 - DNA, 16 bp, Artificial sequence
  Synthetic oligonucleotide
ctaaagtaaggactgg

SEQ ID NO: 1005 - DNA, 16 bp, Artificial sequence
  Synthetic oligonucleotide
ccataattagcaacca

SEQ ID NO: 1006 - DNA, 16 bp, Artificial sequence
  Synthetic oligonucleotide
acaaatctaacatgac

SEQ ID NO: 1007 - DNA, 16 bp, Artificial sequence
  Synthetic oligonucleotide
aattatggtaaagcac

SEQ ID NO: 1008 - DNA, 16 bp, Artificial sequence
  Synthetic oligonucleotide
gtatgataattaaacc

SEQ ID NO: 1009 - DNA, 16 bp, Artificial sequence
  Synthetic oligonucleotide
agattaaaagaaccac

SEQ ID NO: 1010 - DNA, 16 bp, Artificial sequence
  Synthetic oligonucleotide
caaacaaccatgtccc

SEQ ID NO: 1011 - DNA, 16 bp, Artificial sequence
  Synthetic oligonucleotide
gattagtagcattcct

SEQ ID NO: 1012 - DNA, 16 bp, Artificial sequence
  Synthetic oligonucleotide
ccaggaatagcgcagg

SEQ ID NO: 1013 - DNA, 16 bp, Artificial sequence
  Synthetic oligonucleotide
ttatatcaacctggca

SEQ ID NO: 1014 - DNA, 16 bp, Artificial sequence
  Synthetic oligonucleotide
cactaagaagacacct

SEQ ID NO: 1015 - DNA, 16 bp, Artificial sequence
  Synthetic oligonucleotide
cctaatcttgagtggc

SEQ ID NO: 1016 - DNA, 16 bp, Artificial sequence
  Synthetic oligonucleotide
ggaataatgcaggtgg

SEQ ID NO: 1017 - DNA, 16 bp, Artificial sequence
  Synthetic oligonucleotide
catgtagcagtgtccc

SEQ ID NO: 1018 - DNA, 16 bp, Artificial sequence
  Synthetic oligonucleotide
tacaggagagatatca

SEQ ID NO: 1019 - DNA, 16 bp, Artificial sequence
  Synthetic oligonucleotide
caattcccatgatgaa

SEQ ID NO: 1020 - DNA, 16 bp, Artificial sequence
  Synthetic oligonucleotide
cagcatttacgcttcc

SEQ ID NO: 1021 - DNA, 16 bp, Artificial sequence
  Synthetic oligonucleotide
tccaactctcatctat

SEQ ID NO: 1022 - DNA, 16 bp, Artificial sequence
  Synthetic oligonucleotide
ggacaaactcttcact

SEQ ID NO: 1023 - DNA, 16 bp, Artificial sequence
  Synthetic oligonucleotide
gaacaaccacttcacg

SEQ ID NO: 1024 - DNA, 16 bp, Artificial sequence
  Synthetic oligonucleotide
tgttggctcgatccag

SEQ ID NO: 1025 - DNA, 16 bp, Artificial sequence
  Synthetic oligonucleotide
cggatgagtctttttt

SEQ ID NO: 1026 - DNA, 16 bp, Artificial sequence
  Synthetic oligonucleotide
gttttcagggtcctta

SEQ ID NO: 1027 - DNA, 16 bp, Artificial sequence
  Synthetic oligonucleotide
gtctgacccctcggga

SEQ ID NO: 1028 - DNA, 16 bp, Artificial sequence
  Synthetic oligonucleotide
atggcccacgccttct

SEQ ID NO: 1029 - DNA, 16 bp, Artificial sequence
  Synthetic oligonucleotide
taaaggtctctcctgt

SEQ ID NO: 1030 - DNA, 16 bp, Artificial sequence
  Synthetic oligonucleotide
cttcctggcatatcac

SEQ ID NO: 1031 - DNA, 16 bp, Artificial sequence
  Synthetic oligonucleotide
cttcttacggtaatct

SEQ ID NO: 1032 - DNA, 16 bp, Artificial sequence
  Synthetic oligonucleotide
cagacgggcattcctg

SEQ ID NO: 1033 - DNA, 16 bp, Artificial sequence
  Synthetic oligonucleotide
gccccctggaacacca

SEQ ID NO: 1034 - DNA, 16 bp, Artificial sequence
  Synthetic oligonucleotide
gggttttctcacgatc

SEQ ID NO: 1035 - DNA, 16 bp, Artificial sequence
  Synthetic oligonucleotide
gcaagtgctgcagttt

SEQ ID NO: 1036 - DNA, 16 bp, Artificial sequence
  Synthetic oligonucleotide
gcgcagaggccgtgct

SEQ ID NO: 1037 - DNA, 16 bp, Artificial sequence
  Synthetic oligonucleotide
aacttctcgcagtcca

SEQ ID NO: 1038 - DNA, 16 bp, Artificial sequence
  Synthetic oligonucleotide
taccaggccaaagagg

SEQ ID NO: 1039 - DNA, 16 bp, Artificial sequence
  Synthetic oligonucleotide
gcctgatttgctgaga

SEQ ID NO: 1040 - DNA, 16 bp, Artificial sequence
  Synthetic oligonucleotide
tagtccatggcccttt

SEQ ID NO: 1041 - DNA, 16 bp, Artificial sequence
  Synthetic oligonucleotide
catgttatggagaaac

SEQ ID NO: 1042 - DNA, 16 bp, Artificial sequence
  Synthetic oligonucleotide
cacactgcaccatatc

SEQ ID NO: 1043 - DNA, 16 bp, Artificial sequence
  Synthetic oligonucleotide
ctggaagtgaggtggc

SEQ ID NO: 1044 - DNA, 16 bp, Artificial sequence
  Synthetic oligonucleotide
ccaaccacaatctccg

SEQ ID NO: 1045 - DNA, 16 bp, Artificial sequence
  Synthetic oligonucleotide
tgctgatgtgaggcag

SEQ ID NO: 1046 - DNA, 16 bp, Artificial sequence
  Synthetic oligonucleotide
ggtgctcaatactgat

SEQ ID NO: 1047 - DNA, 16 bp, Artificial sequence
  Synthetic oligonucleotide
gagtctcccaaggcat

SEQ ID NO: 1048 - DNA, 16 bp, Artificial sequence
  Synthetic oligonucleotide
ccagtttctgcaggtt

SEQ ID NO: 1049 - DNA, 16 bp, Artificial sequence
  Synthetic oligonucleotide
tagtgctgagtaccga

SEQ ID NO: 1050 - DNA, 16 bp, Artificial sequence
  Synthetic oligonucleotide
tgtctccgagagtgtt

SEQ ID NO: 1051 - DNA, 16 bp, Artificial sequence
  Synthetic oligonucleotide
gttgcagttgtctaat

SEQ ID NO: 1052 - DNA, 16 bp, Artificial sequence
  Synthetic oligonucleotide
catgacccccaggtcg

SEQ ID NO: 1053 - DNA, 16 bp, Artificial sequence
  Synthetic oligonucleotide
agctggagggaccgga

SEQ ID NO: 1054 - DNA, 16 bp, Artificial sequence
  Synthetic oligonucleotide
cccgatgctgtcattg

SEQ ID NO: 1055 - DNA, 16 bp, Artificial sequence
  Synthetic oligonucleotide
tgctttattgaatgag

SEQ ID NO: 1056 - DNA, 16 bp, Artificial sequence
  Synthetic oligonucleotide
ctagttctgtgttatg

SEQ ID NO: 1057 - DNA, 16 bp, Artificial sequence
  Synthetic oligonucleotide
gaacagctagagagga

SEQ ID NO: 1058 - DNA, 16 bp, Artificial sequence
  Synthetic oligonucleotide
tggtatatggtaccat

SEQ ID NO: 1059 - DNA, 16 bp, Artificial sequence
  Synthetic oligonucleotide
ctacatcatcatcctg

SEQ ID NO: 1060 - DNA, 16 bp, Artificial sequence
  Synthetic oligonucleotide
gaaataaaccatgggc

SEQ ID NO: 1061 - DNA, 16 bp, Artificial sequence
  Synthetic oligonucleotide
caacatgcatctgtgt

SEQ ID NO: 1062 - DNA, 16 bp, Artificial sequence
  Synthetic oligonucleotide
gacaatggatttcctg

SEQ ID NO: 1063 - DNA, 16 bp, Artificial sequence
  Synthetic oligonucleotide
catacatcaatctttg

SEQ ID NO: 1064 - DNA, 16 bp, Artificial sequence
  Synthetic oligonucleotide
cctagaaagagggtct

SEQ ID NO: 1065 - DNA, 16 bp, Artificial sequence
  Synthetic oligonucleotide
ctagagaaatgggtgc

SEQ ID NO: 1066 - DNA, 16 bp, Artificial sequence
  Synthetic oligonucleotide
gatgggtgctgagccc

SEQ ID NO: 1067 - DNA, 16 bp, Artificial sequence
  Synthetic oligonucleotide
tcagtgagagtctgtc

SEQ ID NO: 1068 - DNA, 16 bp, Artificial sequence
  Synthetic oligonucleotide
tccagtcagagtctgt

SEQ ID NO: 1069 - DNA, 16 bp, Artificial sequence
  Synthetic oligonucleotide
tctttaaaggagtgac

SEQ ID NO: 1070 - DNA, 16 bp, Artificial sequence
  Synthetic oligonucleotide
agagaatggtcgggtg

SEQ ID NO: 1071 - DNA, 16 bp, Artificial sequence
  Synthetic oligonucleotide
aatagttcataggtcc

SEQ ID NO: 1072 - DNA, 16 bp, Artificial sequence
  Synthetic oligonucleotide
ctgaccagagagctcc

SEQ ID NO: 1073 - DNA, 16 bp, Artificial sequence
  Synthetic oligonucleotide
gaatagagaatgcatc

SEQ ID NO: 1074 - DNA, 16 bp, Artificial sequence
  Synthetic oligonucleotide
catacaacatcgaggg

SEQ ID NO: 1075 - DNA, 16 bp, Artificial sequence
  Synthetic oligonucleotide
accaatactacatctt

SEQ ID NO: 1076 - DNA, 16 bp, Artificial sequence
  Synthetic oligonucleotide
gaaactctagttctat

SEQ ID NO: 1077 - DNA, 16 bp, Artificial sequence
  Synthetic oligonucleotide
actaacaaaccagcct

SEQ ID NO: 1078 - DNA, 16 bp, Artificial sequence
  Synthetic oligonucleotide
gacaaagttatgaggc

SEQ ID NO: 1079 - DNA, 16 bp, Artificial sequence
  Synthetic oligonucleotide
tagatattattgtcag

SEQ ID NO: 1080 - DNA, 16 bp, Artificial sequence
  Synthetic oligonucleotide
gtttagcatgtctatt

SEQ ID NO: 1081 - DNA, 16 bp, Artificial sequence
  Synthetic oligonucleotide
actaagtagtgaccta

SEQ ID NO: 1082 - DNA, 16 bp, Artificial sequence
  Synthetic oligonucleotide
tccataattagcaacc

SEQ ID NO: 1083 - DNA, 16 bp, Artificial sequence
  Synthetic oligonucleotide
gttacaaatctaacat

SEQ ID NO: 1084 - DNA, 16 bp, Artificial sequence
  Synthetic oligonucleotide
aaagaacagttatccc

SEQ ID NO: 1085 - DNA, 16 bp, Artificial sequence
  Synthetic oligonucleotide
ctattcaatgaggcag

SEQ ID NO: 1086 - DNA, 16 bp, Artificial sequence
  Synthetic oligonucleotide
gatagtagaaagtggg

SEQ ID NO: 1087 - DNA, 16 bp, Artificial sequence
  Synthetic oligonucleotide
tcaaacaaccatgtcc

SEQ ID NO: 1088 - DNA, 16 bp, Artificial sequence
  Synthetic oligonucleotide
ggattagtagcattcc

SEQ ID NO: 1089 - DNA, 16 bp, Artificial sequence
  Synthetic oligonucleotide
ctattccatgaagcca

SEQ ID NO: 1090 - DNA, 16 bp, Artificial sequence
  Synthetic oligonucleotide
attatatcaacctggc

SEQ ID NO: 1091 - DNA, 16 bp, Artificial sequence
  Synthetic oligonucleotide
acactaagaagacacc

SEQ ID NO: 1092 - DNA, 16 bp, Artificial sequence
  Synthetic oligonucleotide
acctaatcttgagtgg

SEQ ID NO: 1093 - DNA, 16 bp, Artificial sequence
  Synthetic oligonucleotide
gggaataatgcaggtg

SEQ ID NO: 1094 - DNA, 16 bp, Artificial sequence
  Synthetic oligonucleotide
ctacatgtagcagtgt

SEQ ID NO: 1095 - DNA, 16 bp, Artificial sequence
  Synthetic oligonucleotide
cttacaggagagatat

SEQ ID NO: 1096 - DNA, 16 bp, Artificial sequence
  Synthetic oligonucleotide
taacaattcccatgat

SEQ ID NO: 1097 - DNA, 16 bp, Artificial sequence
  Synthetic oligonucleotide
cttagtatcactgtat

SEQ ID NO: 1098 - DNA, 16 bp, Artificial sequence
  Synthetic oligonucleotide
atccccaacacggctg

SEQ ID NO: 1099 - DNA, 16 bp, Artificial sequence
  Synthetic oligonucleotide
tggacaaactcttcac

SEQ ID NO: 1100 - DNA, 16 bp, Artificial sequence
  Synthetic oligonucleotide
gtgaacaaccacttca

SEQ ID NO: 1101 - DNA, 16 bp, Artificial sequence
  Synthetic oligonucleotide
ctgttggctcgatcca

SEQ ID NO: 1102 - DNA, 16 bp, Artificial sequence
  Synthetic oligonucleotide
gcacacggatgagtct

SEQ ID NO: 1103 - DNA, 16 bp, Artificial sequence
  Synthetic oligonucleotide
agctgttttcagggtc

SEQ ID NO: 1104 - DNA, 16 bp, Artificial sequence
  Synthetic oligonucleotide
tgtctgacccctcggg

SEQ ID NO: 1105 - DNA, 16 bp, Artificial sequence
  Synthetic oligonucleotide
ccatggcccacgcctt

SEQ ID NO: 1106 - DNA, 16 bp, Artificial sequence
  Synthetic oligonucleotide
ataaaggtctctcctg

SEQ ID NO: 1107 - DNA, 16 bp, Artificial sequence
  Synthetic oligonucleotide
tcttcctggcatatca

SEQ ID NO: 1108 - DNA, 16 bp, Artificial sequence
  Synthetic oligonucleotide
acttcttacggtaatc

SEQ ID NO: 1109 - DNA, 16 bp, Artificial sequence
  Synthetic oligonucleotide
ccagacgggcattcct

SEQ ID NO: 1110 - DNA, 16 bp, Artificial sequence
  Synthetic oligonucleotide
tggtagagtgtccccg

SEQ ID NO: 1111 - DNA, 16 bp, Artificial sequence
  Synthetic oligonucleotide
gattctggagggtttt

SEQ ID NO: 1112 - DNA, 16 bp, Artificial sequence
  Synthetic oligonucleotide
tggtccagcaagtgct

SEQ ID NO: 1113 - DNA, 16 bp, Artificial sequence
  Synthetic oligonucleotide
ccagaggtgggcgcag

SEQ ID NO: 1114 - DNA, 16 bp, Artificial sequence
  Synthetic oligonucleotide
gaacttctcgcagtcc

SEQ ID NO: 1115 - DNA, 16 bp, Artificial sequence
  Synthetic oligonucleotide
ttaccaggccaaagag

SEQ ID NO: 1116 - DNA, 16 bp, Artificial sequence
  Synthetic oligonucleotide
ctccagcctgatttgc

SEQ ID NO: 1117 - DNA, 16 bp, Artificial sequence
  Synthetic oligonucleotide
atagtccatggccctt

SEQ ID NO: 1118 - DNA, 16 bp, Artificial sequence
  Synthetic oligonucleotide
ggcatgttatggagaa

SEQ ID NO: 1119 - DNA, 16 bp, Artificial sequence
  Synthetic oligonucleotide
gacacactgcaccata

SEQ ID NO: 1120 - DNA, 16 bp, Artificial sequence
  Synthetic oligonucleotide
actgaaaagaggcccc

SEQ ID NO: 1121 - DNA, 16 bp, Artificial sequence
  Synthetic oligonucleotide
cccaaccacaatctcc

SEQ ID NO: 1122 - DNA, 16 bp, Artificial sequence
  Synthetic oligonucleotide
atgctgatgtgaggca

SEQ ID NO: 1123 - DNA, 16 bp, Artificial sequence
  Synthetic oligonucleotide
tggtgctcaatactga

SEQ ID NO: 1124 - DNA, 16 bp, Artificial sequence
  Synthetic oligonucleotide
tgagtctcccaaggca

SEQ ID NO: 1125 - DNA, 16 bp, Artificial sequence
  Synthetic oligonucleotide
attcaccaaccccagt

SEQ ID NO: 1126 - DNA, 16 bp, Artificial sequence
  Synthetic oligonucleotide
ttagtgctgagtaccg

SEQ ID NO: 1127 - DNA, 16 bp, Artificial sequence
  Synthetic oligonucleotide
ttgtctccgagagtgt

SEQ ID NO: 1128 - DNA, 16 bp, Artificial sequence
  Synthetic oligonucleotide
ggttgcagttgtctaa

SEQ ID NO: 1129 - DNA, 16 bp, Artificial sequence
  Synthetic oligonucleotide
atcatgacccccaggt

SEQ ID NO: 1130 - DNA, 16 bp, Artificial sequence
  Synthetic oligonucleotide
ccagctggagggaccg

SEQ ID NO: 1131 - DNA, 16 bp, Artificial sequence
  Synthetic oligonucleotide
acaacacccgatgctg

SEQ ID NO: 1132 - DNA, 16 bp, Artificial sequence
  Synthetic oligonucleotide
gtgctttattgaatga

SEQ ID NO: 1133 - DNA, 16 bp, Artificial sequence
  Synthetic oligonucleotide
actagttctgtgttat

SEQ ID NO: 1134 - DNA, 16 bp, Artificial sequence
  Synthetic oligonucleotide
tcaggaacagctagag

SEQ ID NO: 1135 - DNA, 16 bp, Artificial sequence
  Synthetic oligonucleotide
agtaatccaggtgttc

SEQ ID NO: 1136 - DNA, 16 bp, Artificial sequence
  Synthetic oligonucleotide
catttgtactcctcct

SEQ ID NO: 1137 - DNA, 16 bp, Artificial sequence
  Synthetic oligonucleotide
gttaagagccaggctt

SEQ ID NO: 1138 - DNA, 16 bp, Artificial sequence
  Synthetic oligonucleotide
tactaaaagctcccag

SEQ ID NO: 1139 - DNA, 16 bp, Artificial sequence
  Synthetic oligonucleotide
tgacaatggatttcct

SEQ ID NO: 1140 - DNA, 16 bp, Artificial sequence
  Synthetic oligonucleotide
cccaaacatttgttcc

SEQ ID NO: 1141 - DNA, 16 bp, Artificial sequence
  Synthetic oligonucleotide
cttaattttgccccac

SEQ ID NO: 1142 - DNA, 16 bp, Artificial sequence
  Synthetic oligonucleotide
tctagagaaatgggtg

SEQ ID NO: 1143 - DNA, 16 bp, Artificial sequence
  Synthetic oligonucleotide
ggatgggtgctgagcc

SEQ ID NO: 1144 - DNA, 16 bp, Artificial sequence
  Synthetic oligonucleotide
ttcagtgagagtctgt

SEQ ID NO: 1145 - DNA, 16 bp, Artificial sequence
  Synthetic oligonucleotide
gtcagagtctgtcctc

SEQ ID NO: 1146 - DNA, 16 bp, Artificial sequence
  Synthetic oligonucleotide
gtctttaaaggagtga

SEQ ID NO: 1147 - DNA, 16 bp, Artificial sequence
  Synthetic oligonucleotide
gcatttaagccaccga

SEQ ID NO: 1148 - DNA, 16 bp, Artificial sequence
  Synthetic oligonucleotide
gcaatagttcataggt

SEQ ID NO: 1149 - DNA, 16 bp, Artificial sequence
  Synthetic oligonucleotide
cctgaccagagagctc

SEQ ID NO: 1150 - DNA, 16 bp, Artificial sequence
  Synthetic oligonucleotide
ctggaatagagaatgc

SEQ ID NO: 1151 - DNA, 16 bp, Artificial sequence
  Synthetic oligonucleotide
gcatacaacatcgagg

SEQ ID NO: 1152 - DNA, 16 bp, Artificial sequence
  Synthetic oligonucleotide
caccaatactacatct

SEQ ID NO: 1153 - DNA, 16 bp, Artificial sequence
  Synthetic oligonucleotide
ctaagaaactctagtt

SEQ ID NO: 1154 - DNA, 16 bp, Artificial sequence
  Synthetic oligonucleotide
acactaacaaaccagc

SEQ ID NO: 1155 - DNA, 16 bp, Artificial sequence
  Synthetic oligonucleotide
ggaattaaggcagtgg

SEQ ID NO: 1156 - DNA, 16 bp, Artificial sequence
  Synthetic oligonucleotide
tccaatttgcttattg

SEQ ID NO: 1157 - DNA, 16 bp, Artificial sequence
  Synthetic oligonucleotide
gggtatattgtttagc

SEQ ID NO: 1158 - DNA, 16 bp, Artificial sequence
  Synthetic oligonucleotide
aaaggtaaaccaggcg

SEQ ID NO: 1159 - DNA, 16 bp, Artificial sequence
  Synthetic oligonucleotide
gtccataattagcaac

SEQ ID NO: 1160 - DNA, 16 bp, Artificial sequence
  Synthetic oligonucleotide
ttatttggtgatacgg

SEQ ID NO: 1161 - DNA, 16 bp, Artificial sequence
  Synthetic oligonucleotide
ttatagatacctatct

SEQ ID NO: 1162 - DNA, 16 bp, Artificial sequence
  Synthetic oligonucleotide
cactattcaatgaggc

SEQ ID NO: 1163 - DNA, 16 bp, Artificial sequence
  Synthetic oligonucleotide
ataagtaggagcttct

SEQ ID NO: 1164 - DNA, 16 bp, Artificial sequence
  Synthetic oligonucleotide
atcaaacaaccatgtc

SEQ ID NO: 1165 - DNA, 16 bp, Artificial sequence
  Synthetic oligonucleotide
gggattagtagcattc

SEQ ID NO: 1166 - DNA, 16 bp, Artificial sequence
  Synthetic oligonucleotide
gtaattcctaggagca

SEQ ID NO: 1167 - DNA, 16 bp, Artificial sequence
  Synthetic oligonucleotide
tattatatcaacctgg

SEQ ID NO: 1168 - DNA, 16 bp, Artificial sequence
  Synthetic oligonucleotide
catgatcctgtaacaa

SEQ ID NO: 1169 - DNA, 16 bp, Artificial sequence
  Synthetic oligonucleotide
aatatccaccacaact

SEQ ID NO: 1170 - DNA, 16 bp, Artificial sequence
  Synthetic oligonucleotide
agggaataatgcaggt

SEQ ID NO: 1171 - DNA, 16 bp, Artificial sequence
  Synthetic oligonucleotide
ggctaggtcagtgatg

SEQ ID NO: 1172 - DNA, 16 bp, Artificial sequence
  Synthetic oligonucleotide
atgaagttgtgagggt

SEQ ID NO: 1173 - DNA, 16 bp, Artificial sequence
  Synthetic oligonucleotide
ttaacaattcccatga

SEQ ID NO: 1174 - DNA, 16 bp, Artificial sequence
  Synthetic oligonucleotide
tcttagtatcactgta

SEQ ID NO: 1175 - DNA, 16 bp, Artificial sequence
  Synthetic oligonucleotide
gcccatcccacgcttc

SEQ ID NO: 1176 - DNA, 16 bp, Artificial sequence
  Synthetic oligonucleotide
gacattggacaaactc

SEQ ID NO: 1177 - DNA, 16 bp, Artificial sequence
  Synthetic oligonucleotide
cggtgaacaaccactt

SEQ ID NO: 1178 - DNA, 16 bp, Artificial sequence
  Synthetic oligonucleotide
cctgttggctcgatcc

SEQ ID NO: 1179 - DNA, 16 bp, Artificial sequence
  Synthetic oligonucleotide
ggcacacggatgagtc

SEQ ID NO: 1180 - DNA, 16 bp, Artificial sequence
  Synthetic oligonucleotide
gtgcttgccatcttca

SEQ ID NO: 1181 - DNA, 16 bp, Artificial sequence
  Synthetic oligonucleotide
ctgtctgacccctcgg

SEQ ID NO: 1182 - DNA, 16 bp, Artificial sequence
  Synthetic oligonucleotide
cacggccatggcccac

SEQ ID NO: 1183 - DNA, 16 bp, Artificial sequence
  Synthetic oligonucleotide
ttctcataaaggtctc

SEQ ID NO: 1184 - DNA, 16 bp, Artificial sequence
  Synthetic oligonucleotide
gtcttcctggcatatc

SEQ ID NO: 1185 - DNA, 16 bp, Artificial sequence
  Synthetic oligonucleotide
gtacttcttacggtaa

SEQ ID NO: 1186 - DNA, 16 bp, Artificial sequence
  Synthetic oligonucleotide
cccagacgggcattcc

SEQ ID NO: 1187 - DNA, 16 bp, Artificial sequence
  Synthetic oligonucleotide
tcttggtagagtgtcc

SEQ ID NO: 1188 - DNA, 16 bp, Artificial sequence
  Synthetic oligonucleotide
ggattctggagggttt

SEQ ID NO: 1189 - DNA, 16 bp, Artificial sequence
  Synthetic oligonucleotide
atggtccagcaagtgc

SEQ ID NO: 1190 - DNA, 16 bp, Artificial sequence
  Synthetic oligonucleotide
cccagaggtgggcgca

SEQ ID NO: 1191 - DNA, 16 bp, Artificial sequence
  Synthetic oligonucleotide
ggtagtacatggcggc

SEQ ID NO: 1192 - DNA, 16 bp, Artificial sequence
  Synthetic oligonucleotide
gtttaccaggccaaag

SEQ ID NO: 1193 - DNA, 16 bp, Artificial sequence
  Synthetic oligonucleotide
caatccatttcagcag

SEQ ID NO: 1194 - DNA, 16 bp, Artificial sequence
  Synthetic oligonucleotide
aatagtccatggccct

SEQ ID NO: 1195 - DNA, 16 bp, Artificial sequence
  Synthetic oligonucleotide
ctccttgggcatgtta

SEQ ID NO: 1196 - DNA, 16 bp, Artificial sequence
  Synthetic oligonucleotide
ggacacactgcaccat

SEQ ID NO: 1197 - DNA, 16 bp, Artificial sequence
  Synthetic oligonucleotide
aactgaaaagaggccc

SEQ ID NO: 1198 - DNA, 16 bp, Artificial sequence
  Synthetic oligonucleotide
cgccccaaccacaatc

SEQ ID NO: 1199 - DNA, 16 bp, Artificial sequence
  Synthetic oligonucleotide
aacatgctgatgtgag

SEQ ID NO: 1200 - DNA, 16 bp, Artificial sequence
  Synthetic oligonucleotide
ctggtgctcaatactg

SEQ ID NO: 1201 - DNA, 16 bp, Artificial sequence
  Synthetic oligonucleotide
gactcctgagtctccc

SEQ ID NO: 1202 - DNA, 16 bp, Artificial sequence
  Synthetic oligonucleotide
gaattcaccaacccca

SEQ ID NO: 1203 - DNA, 16 bp, Artificial sequence
  Synthetic oligonucleotide
attagtgctgagtacc

SEQ ID NO: 1204 - DNA, 16 bp, Artificial sequence
  Synthetic oligonucleotide
cttgtctccgagagtg

SEQ ID NO: 1205 - DNA, 16 bp, Artificial sequence
  Synthetic oligonucleotide
aggttgcagttgtcta

SEQ ID NO: 1206 - DNA, 16 bp, Artificial sequence
  Synthetic oligonucleotide
cagaacatcatgaccc

SEQ ID NO: 1207 - DNA, 16 bp, Artificial sequence
  Synthetic oligonucleotide
tccacctgagggcccc

SEQ ID NO: 1208 - DNA, 16 bp, Artificial sequence
  Synthetic oligonucleotide
aacaacacccgatgct

SEQ ID NO: 1209 - DNA, 16 bp, Artificial sequence
  Synthetic oligonucleotide
agtgctttattgaatg

SEQ ID NO: 1210 - DNA, 16 bp, Artificial sequence
  Synthetic oligonucleotide
caactagttctgtgtt

SEQ ID NO: 1211 - DNA, 16 bp, Artificial sequence
  Synthetic oligonucleotide
gcctcaggaacagcta

SEQ ID NO: 1212 - DNA, 16 bp, Artificial sequence
  Synthetic oligonucleotide
aagtaatccaggtgtt

SEQ ID NO: 1213 - DNA, 16 bp, Artificial sequence
  Synthetic oligonucleotide
gtagtagtagaaattg

SEQ ID NO: 1214 - DNA, 16 bp, Artificial sequence
  Synthetic oligonucleotide
gttataacttttctgc

SEQ ID NO: 1215 - DNA, 16 bp, Artificial sequence
  Synthetic oligonucleotide
gactttagaatcaccc

SEQ ID NO: 1216 - DNA, 16 bp, Artificial sequence
  Synthetic oligonucleotide
cttaatcaccgccgct

SEQ ID NO: 1217 - DNA, 16 bp, Artificial sequence
  Synthetic oligonucleotide
taaactggcattcccc

SEQ ID NO: 1218 - DNA, 16 bp, Artificial sequence
  Synthetic oligonucleotide
ttaggaaagggacccc

SEQ ID NO: 1219 - DNA, 16 bp, Artificial sequence
  Synthetic oligonucleotide
atctagagaaatgggt

SEQ ID NO: 1220 - DNA, 16 bp, Artificial sequence
  Synthetic oligonucleotide
ccatctagagggatgg

SEQ ID NO: 1221 - DNA, 16 bp, Artificial sequence
  Synthetic oligonucleotide
cttcagtgagagtctg

SEQ ID NO: 1222 - DNA, 16 bp, Artificial sequence
  Synthetic oligonucleotide
gaaagatgggtgctga

SEQ ID NO: 1223 - DNA, 16 bp, Artificial sequence
  Synthetic oligonucleotide
tcataatgtggctgtt

SEQ ID NO: 1224 - DNA, 16 bp, Artificial sequence
  Synthetic oligonucleotide
agcatttaagccaccg

SEQ ID NO: 1225 - DNA, 16 bp, Artificial sequence
  Synthetic oligonucleotide
gaacaacattctagct

SEQ ID NO: 1226 - DNA, 16 bp, Artificial sequence
  Synthetic oligonucleotide
acctgaccagagagct

SEQ ID NO: 1227 - DNA, 16 bp, Artificial sequence
  Synthetic oligonucleotide
ctgacaagagagctct

SEQ ID NO: 1228 - DNA, 16 bp, Artificial sequence
  Synthetic oligonucleotide
ggtgagaaatggccct

SEQ ID NO: 1229 - DNA, 16 bp, Artificial sequence
  Synthetic oligonucleotide
aagtaagcattctcca

SEQ ID NO: 1230 - DNA, 16 bp, Artificial sequence
  Synthetic oligonucleotide
actaagaaactctagt

SEQ ID NO: 1231 - DNA, 16 bp, Artificial sequence
  Synthetic oligonucleotide
taaaacatccaccatg

SEQ ID NO: 1232 - DNA, 16 bp, Artificial sequence
  Synthetic oligonucleotide
gggaattaaggcagtg

SEQ ID NO: 1233 - DNA, 16 bp, Artificial sequence
  Synthetic oligonucleotide
acctatccaatttgct

SEQ ID NO: 1234 - DNA, 16 bp, Artificial sequence
  Synthetic oligonucleotide
tcttatacacagggta

SEQ ID NO: 1235 - DNA, 16 bp, Artificial sequence
  Synthetic oligonucleotide
gttgaaattgagaggt

SEQ ID NO: 1236 - DNA, 16 bp, Artificial sequence
  Synthetic oligonucleotide
gaaatccatttgtcca

SEQ ID NO: 1237 - DNA, 16 bp, Artificial sequence
  Synthetic oligonucleotide
cttatttggtgatacg

SEQ ID NO: 1238 - DNA, 16 bp, Artificial sequence
  Synthetic oligonucleotide
ccacttatagatacct

SEQ ID NO: 1239 - DNA, 16 bp, Artificial sequence
  Synthetic oligonucleotide
ccactattcaatgagg

SEQ ID NO: 1240 - DNA, 16 bp, Artificial sequence
  Synthetic oligonucleotide
aataagtaggagcttc

SEQ ID NO: 1241 - DNA, 16 bp, Artificial sequence
  Synthetic oligonucleotide
gaatcaaacaaccatg

SEQ ID NO: 1242 - DNA, 16 bp, Artificial sequence
  Synthetic oligonucleotide
agggattagtagcatt

SEQ ID NO: 1243 - DNA, 16 bp, Artificial sequence
  Synthetic oligonucleotide
cgtaattcctaggagc

SEQ ID NO: 1244 - DNA, 16 bp, Artificial sequence
  Synthetic oligonucleotide
gattattatatcaacc

SEQ ID NO: 1245 - DNA, 16 bp, Artificial sequence
  Synthetic oligonucleotide
ctatatcatctggaag

SEQ ID NO: 1246 - DNA, 16 bp, Artificial sequence
  Synthetic oligonucleotide
catgatcgcatgaggg

SEQ ID NO: 1247 - DNA, 16 bp, Artificial sequence
  Synthetic oligonucleotide
gaatttaggaaggtac

SEQ ID NO: 1248 - DNA, 16 bp, Artificial sequence
  Synthetic oligonucleotide
ctattttgagcctgtc

SEQ ID NO: 1249 - DNA, 16 bp, Artificial sequence
  Synthetic oligonucleotide
gatgaagttgtgaggg

SEQ ID NO: 1250 - DNA, 16 bp, Artificial sequence
  Synthetic oligonucleotide
cttaacaattcccatg

SEQ ID NO: 1251 - DNA, 16 bp, Artificial sequence
  Synthetic oligonucleotide
cgtttaacaataattt

SEQ ID NO: 1252 - DNA, 16 bp, Artificial sequence
  Synthetic oligonucleotide
acagcctcgcagagaa

SEQ ID NO: 1253 - DNA, 16 bp, Artificial sequence
  Synthetic oligonucleotide
gctatgacattggaca

SEQ ID NO: 1254 - DNA, 16 bp, Artificial sequence
  Synthetic oligonucleotide
tacagtttacggtgaa

SEQ ID NO: 1255 - DNA, 16 bp, Artificial sequence
  Synthetic oligonucleotide
tcctgttggctcgatc

SEQ ID NO: 1256 - DNA, 16 bp, Artificial sequence
  Synthetic oligonucleotide
cagtgaacacggcaca

SEQ ID NO: 1257 - DNA, 16 bp, Artificial sequence
  Synthetic oligonucleotide
ggtgcttgccatcttc

SEQ ID NO: 1258 - DNA, 16 bp, Artificial sequence
  Synthetic oligonucleotide
tctgtctgacccctcg

SEQ ID NO: 1259 - DNA, 16 bp, Artificial sequence
  Synthetic oligonucleotide
acacggccatggccca

SEQ ID NO: 1260 - DNA, 16 bp, Artificial sequence
  Synthetic oligonucleotide
ctttctcataaaggtc

SEQ ID NO: 1261 - DNA, 16 bp, Artificial sequence
  Synthetic oligonucleotide
tgtcttcctggcatat

SEQ ID NO: 1262 - DNA, 16 bp, Artificial sequence
  Synthetic oligonucleotide
tgtacttcttacggta

SEQ ID NO: 1263 - DNA, 16 bp, Artificial sequence
  Synthetic oligonucleotide
cacccagacgggcatt

SEQ ID NO: 1264 - DNA, 16 bp, Artificial sequence
  Synthetic oligonucleotide
gtcttggtagagtgtc

SEQ ID NO: 1265 - DNA, 16 bp, Artificial sequence
  Synthetic oligonucleotide
aggattctggagggtt

SEQ ID NO: 1266 - DNA, 16 bp, Artificial sequence
  Synthetic oligonucleotide
gatggtccagcaagtg

SEQ ID NO: 1267 - DNA, 16 bp, Artificial sequence
  Synthetic oligonucleotide
ccccagaggtgggcgc

SEQ ID NO: 1268 - DNA, 16 bp, Artificial sequence
  Synthetic oligonucleotide
caggtagtacatggcg

SEQ ID NO: 1269 - DNA, 16 bp, Artificial sequence
  Synthetic oligonucleotide
ggtttaccaggccaaa

SEQ ID NO: 1270 - DNA, 16 bp, Artificial sequence
  Synthetic oligonucleotide
ctttcacttcaatcca

SEQ ID NO: 1271 - DNA, 16 bp, Artificial sequence
  Synthetic oligonucleotide
gagagattgatctcaa

SEQ ID NO: 1272 - DNA, 16 bp, Artificial sequence
  Synthetic oligonucleotide
cctccttgggcatgtt

SEQ ID NO: 1273 - DNA, 16 bp, Artificial sequence
  Synthetic oligonucleotide
aggacacactgcacca

SEQ ID NO: 1274 - DNA, 16 bp, Artificial sequence
  Synthetic oligonucleotide
gttagactctggctgg

SEQ ID NO: 1275 - DNA, 16 bp, Artificial sequence
  Synthetic oligonucleotide
cgagaggccacagcgc

SEQ ID NO: 1276 - DNA, 16 bp, Artificial sequence
  Synthetic oligonucleotide
caacatgctgatgtga

SEQ ID NO: 1277 - DNA, 16 bp, Artificial sequence
  Synthetic oligonucleotide
gctggtgctcaatact

SEQ ID NO: 1278 - DNA, 16 bp, Artificial sequence
  Synthetic oligonucleotide
cgactcctgagtctcc

SEQ ID NO: 1279 - DNA, 16 bp, Artificial sequence
  Synthetic oligonucleotide
agaattcaccaacccc

SEQ ID NO: 1280 - DNA, 16 bp, Artificial sequence
  Synthetic oligonucleotide
tgattagtgctgagta

SEQ ID NO: 1281 - DNA, 16 bp, Artificial sequence
  Synthetic oligonucleotide
ccttgtctccgagagt

SEQ ID NO: 1282 - DNA, 16 bp, Artificial sequence
  Synthetic oligonucleotide
gaggttgcagttgtct

SEQ ID NO: 1283 - DNA, 16 bp, Artificial sequence
  Synthetic oligonucleotide
cacagaacatcatgac

SEQ ID NO: 1284 - DNA, 16 bp, Artificial sequence
  Synthetic oligonucleotide
tggatcgcagctctct

SEQ ID NO: 1285 - DNA, 16 bp, Artificial sequence
  Synthetic oligonucleotide
gacaacaacacccgat

SEQ ID NO: 1286 - DNA, 16 bp, Artificial sequence
  Synthetic oligonucleotide
tgatatgagcaaaagt

SEQ ID NO: 1287 - DNA, 16 bp, Artificial sequence
  Synthetic oligonucleotide
tcaactagttctgtgt

SEQ ID NO: 1288 - DNA, 16 bp, Artificial sequence
  Synthetic oligonucleotide
atccagatgccagcct

SEQ ID NO: 1289 - DNA, 16 bp, Artificial sequence
  Synthetic oligonucleotide
gaagtaatccaggtgt

SEQ ID NO: 1290 - DNA, 16 bp, Artificial sequence
  Synthetic oligonucleotide
cttaacatgtgtctcc

SEQ ID NO: 1291 - DNA, 16 bp, Artificial sequence
  Synthetic oligonucleotide
ctagttataacttttc

SEQ ID NO: 1292 - DNA, 16 bp, Artificial sequence
  Synthetic oligonucleotide
tgggaatcctggctga

SEQ ID NO: 1293 - DNA, 16 bp, Artificial sequence
  Synthetic oligonucleotide
gcttaatcaccgccgc

SEQ ID NO: 1294 - DNA, 16 bp, Artificial sequence
  Synthetic oligonucleotide
gctaaactggcattcc

SEQ ID NO: 1295 - DNA, 16 bp, Artificial sequence
  Synthetic oligonucleotide
cttaggaaagggaccc

SEQ ID NO: 1296 - DNA, 16 bp, Artificial sequence
  Synthetic oligonucleotide
tatctagagaaatggg

SEQ ID NO: 1297 - DNA, 16 bp, Artificial sequence
  Synthetic oligonucleotide
gccatctagagggatg

SEQ ID NO: 1298 - DNA, 16 bp, Artificial sequence
  Synthetic oligonucleotide
gcttcagtgagagtct

SEQ ID NO: 1299 - DNA, 16 bp, Artificial sequence
  Synthetic oligonucleotide
tagaaagatgggtgct

SEQ ID NO: 1300 - DNA, 16 bp, Artificial sequence
  Synthetic oligonucleotide
catcatggttgtttca

SEQ ID NO: 1301 - DNA, 16 bp, Artificial sequence
  Synthetic oligonucleotide
aagcatttaagccacc

SEQ ID NO: 1302 - DNA, 16 bp, Artificial sequence
  Synthetic oligonucleotide
ctttatccctgtcatg

SEQ ID NO: 1303 - DNA, 16 bp, Artificial sequence
  Synthetic oligonucleotide
cacctgaccagagagc

SEQ ID NO: 1304 - DNA, 16 bp, Artificial sequence
  Synthetic oligonucleotide
gaccagagagctccag

SEQ ID NO: 1305 - DNA, 16 bp, Artificial sequence
  Synthetic oligonucleotide
taggaattgctgtgct

SEQ ID NO: 1306 - DNA, 16 bp, Artificial sequence
  Synthetic oligonucleotide
caagtaagcattctcc

SEQ ID NO: 1307 - DNA, 16 bp, Artificial sequence
  Synthetic oligonucleotide
cactaagaaactctag

SEQ ID NO: 1308 - DNA, 16 bp, Artificial sequence
  Synthetic oligonucleotide
gtaaaacatccaccat

SEQ ID NO: 1309 - DNA, 16 bp, Artificial sequence
  Synthetic oligonucleotide
tgggaattaaggcagt

SEQ ID NO: 1310 - DNA, 16 bp, Artificial sequence
  Synthetic oligonucleotide
cttgaatgctgatctg

SEQ ID NO: 1311 - DNA, 16 bp, Artificial sequence
  Synthetic oligonucleotide
ctcttatacacagggt

SEQ ID NO: 1312 - DNA, 16 bp, Artificial sequence
  Synthetic oligonucleotide
atgatatctgggtttg

SEQ ID NO: 1313 - DNA, 16 bp, Artificial sequence
  Synthetic oligonucleotide
gcatatacaggaaatc

SEQ ID NO: 1314 - DNA, 16 bp, Artificial sequence
  Synthetic oligonucleotide
ccttatttggtgatac

SEQ ID NO: 1315 - DNA, 16 bp, Artificial sequence
  Synthetic oligonucleotide
ctgattaatgccactt

SEQ ID NO: 1316 - DNA, 16 bp, Artificial sequence
  Synthetic oligonucleotide
agcatttaggaccgtc

SEQ ID NO: 1317 - DNA, 16 bp, Artificial sequence
  Synthetic oligonucleotide
gacaaaatgaggatca

SEQ ID NO: 1318 - DNA, 16 bp, Artificial sequence
  Synthetic oligonucleotide
caacggttacactgaa

SEQ ID NO: 1319 - DNA, 16 bp, Artificial sequence
  Synthetic oligonucleotide
aagggattagtagcat

SEQ ID NO: 1320 - DNA, 16 bp, Artificial sequence
  Synthetic oligonucleotide
aaaatcactggtggcg

SEQ ID NO: 1321 - DNA, 16 bp, Artificial sequence
  Synthetic oligonucleotide
tgattattatatcaac

SEQ ID NO: 1322 - DNA, 16 bp, Artificial sequence
  Synthetic oligonucleotide
tctatatcatctggaa

SEQ ID NO: 1323 - DNA, 16 bp, Artificial sequence
  Synthetic oligonucleotide
acagaatcctccttgg

SEQ ID NO: 1324 - DNA, 16 bp, Artificial sequence
  Synthetic oligonucleotide
cataagatgtgctaca

SEQ ID NO: 1325 - DNA, 16 bp, Artificial sequence
  Synthetic oligonucleotide
atctattttgagcctg

SEQ ID NO: 1326 - DNA, 16 bp, Artificial sequence
  Synthetic oligonucleotide
ttagatgaagttgtga

SEQ ID NO: 1327 - DNA, 16 bp, Artificial sequence
  Synthetic oligonucleotide
caatttggtggtgtta

SEQ ID NO: 1328 - DNA, 16 bp, Artificial sequence
  Synthetic oligonucleotide
ttacaatgtcactatc

SEQ ID NO: 1329 - DNA, 16 bp, Artificial sequence
  Synthetic oligonucleotide
gctgggattccacatc

SEQ ID NO: 1330 - DNA, 16 bp, Artificial sequence
  Synthetic oligonucleotide
gggctatgacattgga

SEQ ID NO: 1331 - DNA, 16 bp, Artificial sequence
  Synthetic oligonucleotide
attacagtttacggtg

SEQ ID NO: 1332 - DNA, 16 bp, Artificial sequence
  Synthetic oligonucleotide
agttctcctgttggct

SEQ ID NO: 1333 - DNA, 16 bp, Artificial sequence
  Synthetic oligonucleotide
gcagtgaacacggcac

SEQ ID NO: 1334 - DNA, 16 bp, Artificial sequence
  Synthetic oligonucleotide
ccagcttgcagcgggt

SEQ ID NO: 1335 - DNA, 16 bp, Artificial sequence
  Synthetic oligonucleotide
ccacatggtctgcctt

SEQ ID NO: 1336 - DNA, 16 bp, Artificial sequence
  Synthetic oligonucleotide
cacacggccatggccc

SEQ ID NO: 1337 - DNA, 16 bp, Artificial sequence
  Synthetic oligonucleotide
gctttctcataaaggt

SEQ ID NO: 1338 - DNA, 16 bp, Artificial sequence
  Synthetic oligonucleotide
ctgtcttcctggcata

SEQ ID NO: 1339 - DNA, 16 bp, Artificial sequence
  Synthetic oligonucleotide
ctgtacttcttacggt

SEQ ID NO: 1340 - DNA, 16 bp, Artificial sequence
  Synthetic oligonucleotide
gttgaggctcacactc

SEQ ID NO: 1341 - DNA, 16 bp, Artificial sequence
  Synthetic oligonucleotide
gacagtggatatagaa

SEQ ID NO: 1342 - DNA, 16 bp, Artificial sequence
  Synthetic oligonucleotide
agaggattctggaggg

SEQ ID NO: 1343 - DNA, 16 bp, Artificial sequence
  Synthetic oligonucleotide
ggatggtccagcaagt

SEQ ID NO: 1344 - DNA, 16 bp, Artificial sequence
  Synthetic oligonucleotide
aaagagcagagccccc

SEQ ID NO: 1345 - DNA, 16 bp, Artificial sequence
  Synthetic oligonucleotide
gcaggtagtacatggc

SEQ ID NO: 1346 - DNA, 16 bp, Artificial sequence
  Synthetic oligonucleotide
tggtttaccaggccaa

SEQ ID NO: 1347 - DNA, 16 bp, Artificial sequence
  Synthetic oligonucleotide
gctttcacttcaatcc

SEQ ID NO: 1348 - DNA, 16 bp, Artificial sequence
  Synthetic oligonucleotide
ggagagattgatctca

SEQ ID NO: 1349 - DNA, 16 bp, Artificial sequence
  Synthetic oligonucleotide
ttcctccttgggcatg

SEQ ID NO: 1350 - DNA, 16 bp, Artificial sequence
  Synthetic oligonucleotide
gaggacacactgcacc

SEQ ID NO: 1351 - DNA, 16 bp, Artificial sequence
  Synthetic oligonucleotide
agttagactctggctg

SEQ ID NO: 1352 - DNA, 16 bp, Artificial sequence
  Synthetic oligonucleotide
gcgagaggccacagcg

SEQ ID NO: 1353 - DNA, 16 bp, Artificial sequence
  Synthetic oligonucleotide
acaacatgctgatgtg

SEQ ID NO: 1354 - DNA, 16 bp, Artificial sequence
  Synthetic oligonucleotide
ggaatggctggtgctc

SEQ ID NO: 1355 - DNA, 16 bp, Artificial sequence
  Synthetic oligonucleotide
gcgactcctgagtctc

SEQ ID NO: 1356 - DNA, 16 bp, Artificial sequence
  Synthetic oligonucleotide
ccagaattcaccaacc

SEQ ID NO: 1357 - DNA, 16 bp, Artificial sequence
  Synthetic oligonucleotide
ctgattagtgctgagt

SEQ ID NO: 1358 - DNA, 16 bp, Artificial sequence
  Synthetic oligonucleotide
atccccttgtctccga

SEQ ID NO: 1359 - DNA, 16 bp, Artificial sequence
  Synthetic oligonucleotide
tgaggttgcagttgtc

SEQ ID NO: 1360 - DNA, 16 bp, Artificial sequence
  Synthetic oligonucleotide
tgtttcagcacttcac

SEQ ID NO: 1361 - DNA, 16 bp, Artificial sequence
  Synthetic oligonucleotide
gatggatcgcagctct

SEQ ID NO: 1362 - DNA, 16 bp, Artificial sequence
  Synthetic oligonucleotide
tgacaacaacacccga

SEQ ID NO: 1363 - DNA, 16 bp, Artificial sequence
  Synthetic oligonucleotide
atgatgatatgagcaa

SEQ ID NO: 1364 - DNA, 16 bp, Artificial sequence
  Synthetic oligonucleotide
gtcaactagttctgtg

SEQ ID NO: 1365 - DNA, 16 bp, Artificial sequence
  Synthetic oligonucleotide
tcctcatccagatgcc

SEQ ID NO: 1366 - DNA, 16 bp, Artificial sequence
  Synthetic oligonucleotide
agaagtaatccaggtg

SEQ ID NO: 1367 - DNA, 16 bp, Artificial sequence
  Synthetic oligonucleotide
ccttaacatgtgtctc

SEQ ID NO: 1368 - DNA, 16 bp, Artificial sequence
  Synthetic oligonucleotide
ctaaaacctaacccca

SEQ ID NO: 1369 - DNA, 16 bp, Artificial sequence
  Synthetic oligonucleotide
cctaatctagtggttg

SEQ ID NO: 1370 - DNA, 16 bp, Artificial sequence
  Synthetic oligonucleotide
atcaaacttgaaacgc

SEQ ID NO: 1371 - DNA, 16 bp, Artificial sequence
  Synthetic oligonucleotide
ttaataccttgtgcta

SEQ ID NO: 1372 - DNA, 16 bp, Artificial sequence
  Synthetic oligonucleotide
gttaagttatgagggt

SEQ ID NO: 1373 - DNA, 16 bp, Artificial sequence
  Synthetic oligonucleotide
ctatctagagaaatgg

SEQ ID NO: 1374 - DNA, 16 bp, Artificial sequence
  Synthetic oligonucleotide
gtgccatctagaggga

SEQ ID NO: 1375 - DNA, 16 bp, Artificial sequence
  Synthetic oligonucleotide
ggcttcagtgagagtc

SEQ ID NO: 1376 - DNA, 16 bp, Artificial sequence
  Synthetic oligonucleotide
tctagaaagatgggtg

SEQ ID NO: 1377 - DNA, 16 bp, Artificial sequence
  Synthetic oligonucleotide
ggaatatatcgagcat

SEQ ID NO: 1378 - DNA, 16 bp, Artificial sequence
  Synthetic oligonucleotide
gtaacatatccatgaa

SEQ ID NO: 1379 - DNA, 16 bp, Artificial sequence
  Synthetic oligonucleotide
tactttatccctgtca

SEQ ID NO: 1380 - DNA, 16 bp, Artificial sequence
  Synthetic oligonucleotide
acacctgaccagagag

SEQ ID NO: 1381 - DNA, 16 bp, Artificial sequence
  Synthetic oligonucleotide
tgaccagagagctcca

SEQ ID NO: 1382 - DNA, 16 bp, Artificial sequence
  Synthetic oligonucleotide
tctaatagtgttgcta

SEQ ID NO: 1383 - DNA, 16 bp, Artificial sequence
  Synthetic oligonucleotide
acaagtaagcattctc

SEQ ID NO: 1384 - DNA, 16 bp, Artificial sequence
  Synthetic oligonucleotide
caattgggctgcacca

SEQ ID NO: 1385 - DNA, 16 bp, Artificial sequence
  Synthetic oligonucleotide
gaggtaaaacatccac

SEQ ID NO: 1386 - DNA, 16 bp, Artificial sequence
  Synthetic oligonucleotide
cctaaggcaatgcact

SEQ ID NO: 1387 - DNA, 16 bp, Artificial sequence
  Synthetic oligonucleotide
gccaaattttgtcttg

SEQ ID NO: 1388 - DNA, 16 bp, Artificial sequence
  Synthetic oligonucleotide
gctcttatacacaggg

SEQ ID NO: 1389 - DNA, 16 bp, Artificial sequence
  Synthetic oligonucleotide
tgtgaatgatatctgg

SEQ ID NO: 1390 - DNA, 16 bp, Artificial sequence
  Synthetic oligonucleotide
gatcagcatatacagg

SEQ ID NO: 1391 - DNA, 16 bp, Artificial sequence
  Synthetic oligonucleotide
gactttatatgtggaa

SEQ ID NO: 1392 - DNA, 16 bp, Artificial sequence
  Synthetic oligonucleotide
actgattaatgccact

SEQ ID NO: 1393 - DNA, 16 bp, Artificial sequence
  Synthetic oligonucleotide
gagcatttaggaccgt

SEQ ID NO: 1394 - DNA, 16 bp, Artificial sequence
  Synthetic oligonucleotide
actttaaacagggtta

SEQ ID NO: 1395 - DNA, 16 bp, Artificial sequence
  Synthetic oligonucleotide
agcaacggttacactg

SEQ ID NO: 1396 - DNA, 16 bp, Artificial sequence
  Synthetic oligonucleotide
gttaattaacatgcag

SEQ ID NO: 1397 - DNA, 16 bp, Artificial sequence
  Synthetic oligonucleotide
taaaatcactggtggc

SEQ ID NO: 1398 - DNA, 16 bp, Artificial sequence
  Synthetic oligonucleotide
attagttagggtggtg

SEQ ID NO: 1399 - DNA, 16 bp, Artificial sequence
  Synthetic oligonucleotide
catctatatcatctgg

SEQ ID NO: 1400 - DNA, 16 bp, Artificial sequence
  Synthetic oligonucleotide
ccaatttggatgaccc

SEQ ID NO: 1401 - DNA, 16 bp, Artificial sequence
  Synthetic oligonucleotide
acataagatgtgctac

SEQ ID NO: 1402 - DNA, 16 bp, Artificial sequence
  Synthetic oligonucleotide
caatctattttgagcc

SEQ ID NO: 1403 - DNA, 16 bp, Artificial sequence
  Synthetic oligonucleotide
gttagatgaagttgtg

SEQ ID NO: 1404 - DNA, 16 bp, Artificial sequence
  Synthetic oligonucleotide
tcaatttggtggtgtt

SEQ ID NO: 1405 - DNA, 16 bp, Artificial sequence
  Synthetic oligonucleotide
ctgcatttaatgcatc

SEQ ID NO: 1406 - DNA, 16 bp, Artificial sequence
  Synthetic oligonucleotide
agggagtggacacaag

SEQ ID NO: 1407 - DNA, 16 bp, Artificial sequence
  Synthetic oligonucleotide
tgtcccgttgattacg

SEQ ID NO: 1408 - DNA, 16 bp, Artificial sequence
  Synthetic oligonucleotide
ggattgtattacagtt

SEQ ID NO: 1409 - DNA, 16 bp, Artificial sequence
  Synthetic oligonucleotide
aagttctcctgttggc

SEQ ID NO: 1410 - DNA, 16 bp, Artificial sequence
  Synthetic oligonucleotide
ataccaggcagtgaac

SEQ ID NO: 1411 - DNA, 16 bp, Artificial sequence
  Synthetic oligonucleotide
ggtacctggccagctt

SEQ ID NO: 1412 - DNA, 16 bp, Artificial sequence
  Synthetic oligonucleotide
atccacatggtctgcc

SEQ ID NO: 1413 - DNA, 16 bp, Artificial sequence
  Synthetic oligonucleotide
ccacacggccatggcc

SEQ ID NO: 1414 - DNA, 16 bp, Artificial sequence
  Synthetic oligonucleotide
gctcatctctttttgc

SEQ ID NO: 1415 - DNA, 16 bp, Artificial sequence
  Synthetic oligonucleotide
cctcttcaatgctgtc

SEQ ID NO: 1416 - DNA, 16 bp, Artificial sequence
  Synthetic oligonucleotide
tctgtacttcttacgg

SEQ ID NO: 1417 - DNA, 16 bp, Artificial sequence
  Synthetic oligonucleotide
cgtttgttgaggctca

SEQ ID NO: 1418 - DNA, 16 bp, Artificial sequence
  Synthetic oligonucleotide
gtgtcacaaggctcac

SEQ ID NO: 1419 - DNA, 16 bp, Artificial sequence
  Synthetic oligonucleotide
ccttgcagctcatcga

SEQ ID NO: 1420 - DNA, 16 bp, Artificial sequence
  Synthetic oligonucleotide
aggatggtccagcaag

SEQ ID NO: 1421 - DNA, 16 bp, Artificial sequence
  Synthetic oligonucleotide
tgaggtcggactcctc

SEQ ID NO: 1422 - DNA, 16 bp, Artificial sequence
  Synthetic oligonucleotide
cttcaaacgactccct

SEQ ID NO: 1423 - DNA, 16 bp, Artificial sequence
  Synthetic oligonucleotide
ctggtttaccaggcca

SEQ ID NO: 1424 - DNA, 16 bp, Artificial sequence
  Synthetic oligonucleotide
gctttttagctttggc

SEQ ID NO: 1425 - DNA, 16 bp, Artificial sequence
  Synthetic oligonucleotide
tggagagattgatctc

SEQ ID NO: 1426 - DNA, 16 bp, Artificial sequence
  Synthetic oligonucleotide
tcggccttccttttcc

SEQ ID NO: 1427 - DNA, 16 bp, Artificial sequence
  Synthetic oligonucleotide
ggaggacacactgcac

SEQ ID NO: 1428 - DNA, 16 bp, Artificial sequence
  Synthetic oligonucleotide
cagttagactctggct

SEQ ID NO: 1429 - DNA, 16 bp, Artificial sequence
  Synthetic oligonucleotide
cactcatgcgagaggc

SEQ ID NO: 1430 - DNA, 16 bp, Artificial sequence
  Synthetic oligonucleotide
gacaacatgctgatgt

SEQ ID NO: 1431 - DNA, 16 bp, Artificial sequence
  Synthetic oligonucleotide
gggaatggctggtgct

SEQ ID NO: 1432 - DNA, 16 bp, Artificial sequence
  Synthetic oligonucleotide
ttgcgactcctgagtc

SEQ ID NO: 1433 - DNA, 16 bp, Artificial sequence
  Synthetic oligonucleotide
gccagaattcaccaac

SEQ ID NO: 1434 - DNA, 16 bp, Artificial sequence
  Synthetic oligonucleotide
tctgattagtgctgag

SEQ ID NO: 1435 - DNA, 16 bp, Artificial sequence
  Synthetic oligonucleotide
gatccccttgtctccg

SEQ ID NO: 1436 - DNA, 16 bp, Artificial sequence
  Synthetic oligonucleotide
gtgaggttgcagttgt

SEQ ID NO: 1437 - DNA, 16 bp, Artificial sequence
  Synthetic oligonucleotide
gctgtttcagcacttc

SEQ ID NO: 1438 - DNA, 16 bp, Artificial sequence
  Synthetic oligonucleotide
ggatggatcgcagctc

SEQ ID NO: 1439 - DNA, 16 bp, Artificial sequence
  Synthetic oligonucleotide
atgacaacaacacccg

SEQ ID NO: 1440 - DNA, 16 bp, Artificial sequence
  Synthetic oligonucleotide
ggaatgatgatatgag

SEQ ID NO: 1441 - DNA, 16 bp, Artificial sequence
  Synthetic oligonucleotide
tagtcaactagttctg

SEQ ID NO: 1442 - DNA, 16 bp, Artificial sequence
  Synthetic oligonucleotide
ttcctcatccagatgc

SEQ ID NO: 1443 - DNA, 16 bp, Artificial sequence
  Synthetic oligonucleotide
caacactcataacagc

SEQ ID NO: 1444 - DNA, 16 bp, Artificial sequence
  Synthetic oligonucleotide
tgccttaacatgtgtc

SEQ ID NO: 1445 - DNA, 16 bp, Artificial sequence
  Synthetic oligonucleotide
gtaaattagccaaagt

SEQ ID NO: 1446 - DNA, 16 bp, Artificial sequence
  Synthetic oligonucleotide
ctattgtcaagtctag

SEQ ID NO: 1447 - DNA, 16 bp, Artificial sequence
  Synthetic oligonucleotide
ccttatcaaacttgaa

SEQ ID NO: 1448 - DNA, 16 bp, Artificial sequence
  Synthetic oligonucleotide
cttaataccttgtgct

SEQ ID NO: 1449 - DNA, 16 bp, Artificial sequence
  Synthetic oligonucleotide
aaaatccatacgctga

SEQ ID NO: 1450 - DNA, 16 bp, Artificial sequence
  Synthetic oligonucleotide
gctatctagagaaatg

SEQ ID NO: 1451 - DNA, 16 bp, Artificial sequence
  Synthetic oligonucleotide
ggtgccatctagaggg

SEQ ID NO: 1452 - DNA, 16 bp, Artificial sequence
  Synthetic oligonucleotide
gtctgtcctcagagga

SEQ ID NO: 1453 - DNA, 16 bp, Artificial sequence
  Synthetic oligonucleotide
agagtaaggcagctgc

SEQ ID NO: 1454 - DNA, 16 bp, Artificial sequence
  Synthetic oligonucleotide
tggaatatatcgagca

SEQ ID NO: 1455 - DNA, 16 bp, Artificial sequence
  Synthetic oligonucleotide
gcagtaacatatccat

SEQ ID NO: 1456 - DNA, 16 bp, Artificial sequence
  Synthetic oligonucleotide
tatactttatccctgt

SEQ ID NO: 1457 - DNA, 16 bp, Artificial sequence
  Synthetic oligonucleotide
aatacacctgaccaga

SEQ ID NO: 1458 - DNA, 16 bp, Artificial sequence
  Synthetic oligonucleotide
gcatcagaacacatct

SEQ ID NO: 1459 - DNA, 16 bp, Artificial sequence
  Synthetic oligonucleotide
ttctaatagtgttgct

SEQ ID NO: 1460 - DNA, 16 bp, Artificial sequence
  Synthetic oligonucleotide
taacaagtaagcattc

SEQ ID NO: 1461 - DNA, 16 bp, Artificial sequence
  Synthetic oligonucleotide
ggcaattgggctgcac

SEQ ID NO: 1462 - DNA, 16 bp, Artificial sequence
  Synthetic oligonucleotide
ggaggtaaaacatcca

SEQ ID NO: 1463 - DNA, 16 bp, Artificial sequence
  Synthetic oligonucleotide
tcctaaggcaatgcac

SEQ ID NO: 1464 - DNA, 16 bp, Artificial sequence
  Synthetic oligonucleotide
attagtggattactcc

SEQ ID NO: 1465 - DNA, 16 bp, Artificial sequence
  Synthetic oligonucleotide
agagaagcacccctcg

SEQ ID NO: 1466 - DNA, 16 bp, Artificial sequence
  Synthetic oligonucleotide
atgtttacaccaagca

SEQ ID NO: 1467 - DNA, 16 bp, Artificial sequence
  Synthetic oligonucleotide
ataaataccacccaga

SEQ ID NO: 1468 - DNA, 16 bp, Artificial sequence
  Synthetic oligonucleotide
cctctaagactttata

SEQ ID NO: 1469 - DNA, 16 bp, Artificial sequence
  Synthetic oligonucleotide
tgcataaaagtctcga

SEQ ID NO: 1470 - DNA, 16 bp, Artificial sequence
  Synthetic oligonucleotide
ccgaaagcagagcatt

SEQ ID NO: 1471 - DNA, 16 bp, Artificial sequence
  Synthetic oligonucleotide
gactttaaacagggtt

SEQ ID NO: 1472 - DNA, 16 bp, Artificial sequence
  Synthetic oligonucleotide
ttaagcaacggttaca

SEQ ID NO: 1473 - DNA, 16 bp, Artificial sequence
  Synthetic oligonucleotide
cggtaagaattctatc

SEQ ID NO: 1474 - DNA, 16 bp, Artificial sequence
  Synthetic oligonucleotide
ctaaaatcactggtgg

SEQ ID NO: 1475 - DNA, 16 bp, Artificial sequence
  Synthetic oligonucleotide
aattagttagggtggt

SEQ ID NO: 1476 - DNA, 16 bp, Artificial sequence
  Synthetic oligonucleotide
actcaagttcctacat

SEQ ID NO: 1477 - DNA, 16 bp, Artificial sequence
  Synthetic oligonucleotide
cccatttagaaatcct

SEQ ID NO: 1478 - DNA, 16 bp, Artificial sequence
  Synthetic oligonucleotide
cacataagatgtgcta

SEQ ID NO: 1479 - DNA, 16 bp, Artificial sequence
  Synthetic oligonucleotide
gttgattgcattcatg

SEQ ID NO: 1480 - DNA, 16 bp, Artificial sequence
  Synthetic oligonucleotide
agagttagatgaagtt

SEQ ID NO: 1481 - DNA, 16 bp, Artificial sequence
  Synthetic oligonucleotide
ctcaatttggtggtgt

SEQ ID NO: 1482 - DNA, 16 bp, Artificial sequence
  Synthetic oligonucleotide
ctattgcccacccact

SEQ ID NO: 1483 - DNA, 16 bp, Artificial sequence
  Synthetic oligonucleotide
atgagatcaggcactc

SEQ ID NO: 1484 - DNA, 16 bp, Artificial sequence
  Synthetic oligonucleotide
ttgtcccgttgattac

SEQ ID NO: 1485 - DNA, 16 bp, Artificial sequence
  Synthetic oligonucleotide
aacaggattgtattac

SEQ ID NO: 1486 - DNA, 16 bp, Artificial sequence
  Synthetic oligonucleotide
aaagttctcctgttgg

SEQ ID NO: 1487 - DNA, 16 bp, Artificial sequence
  Synthetic oligonucleotide
gataccaggcagtgaa

SEQ ID NO: 1488 - DNA, 16 bp, Artificial sequence
  Synthetic oligonucleotide
tctaagtgcatcttaa

SEQ ID NO: 1489 - DNA, 16 bp, Artificial sequence
  Synthetic oligonucleotide
gatccacatggtctgc

SEQ ID NO: 1490 - DNA, 16 bp, Artificial sequence
  Synthetic oligonucleotide
tccacacggccatggc

SEQ ID NO: 1491 - DNA, 16 bp, Artificial sequence
  Synthetic oligonucleotide
ttcggctcatctcttt

SEQ ID NO: 1492 - DNA, 16 bp, Artificial sequence
  Synthetic oligonucleotide
taaacccatccactcc

SEQ ID NO: 1493 - DNA, 16 bp, Artificial sequence
  Synthetic oligonucleotide
ttctgtacttcttacg

SEQ ID NO: 1494 - DNA, 16 bp, Artificial sequence
  Synthetic oligonucleotide
ttgatgagacgcagtc

SEQ ID NO: 1495 - DNA, 16 bp, Artificial sequence
  Synthetic oligonucleotide
tgtgtcacaaggctca

SEQ ID NO: 1496 - DNA, 16 bp, Artificial sequence
  Synthetic oligonucleotide
gcaccttgcagctcat

SEQ ID NO: 1497 - DNA, 16 bp, Artificial sequence
  Synthetic oligonucleotide
ccgaggatggtccagc

SEQ ID NO: 1498 - DNA, 16 bp, Artificial sequence
  Synthetic oligonucleotide
ctgaggtcggactcct

SEQ ID NO: 1499 - DNA, 16 bp, Artificial sequence
  Synthetic oligonucleotide
gcttcaaacgactccc

SEQ ID NO: 1500 - DNA, 16 bp, Artificial sequence
  Synthetic oligonucleotide
cctggtttaccaggcc

SEQ ID NO: 1501 - DNA, 16 bp, Artificial sequence
  Synthetic oligonucleotide
ctgcagctttttagct

SEQ ID NO: 1502 - DNA, 16 bp, Artificial sequence
  Synthetic oligonucleotide
tggtggagagattgat

SEQ ID NO: 1503 - DNA, 16 bp, Artificial sequence
  Synthetic oligonucleotide
gtcggccttccttttc

SEQ ID NO: 1504 - DNA, 16 bp, Artificial sequence
  Synthetic oligonucleotide
tgggaggacacactgc

SEQ ID NO: 1505 - DNA, 16 bp, Artificial sequence
  Synthetic oligonucleotide
tcagttagactctggc

SEQ ID NO: 1506 - DNA, 16 bp, Artificial sequence
  Synthetic oligonucleotide
gcactcatgcgagagg

SEQ ID NO: 1507 - DNA, 16 bp, Artificial sequence
  Synthetic oligonucleotide
tgacaacatgctgatg

SEQ ID NO: 1508 - DNA, 16 bp, Artificial sequence
  Synthetic oligonucleotide
gtcagggaatggctgg

SEQ ID NO: 1509 - DNA, 16 bp, Artificial sequence
  Synthetic oligonucleotide
attgcgactcctgagt

SEQ ID NO: 1510 - DNA, 16 bp, Artificial sequence
  Synthetic oligonucleotide
aaggccagaattcacc

SEQ ID NO: 1511 - DNA, 16 bp, Artificial sequence
  Synthetic oligonucleotide
ttctgattagtgctga

SEQ ID NO: 1512 - DNA, 16 bp, Artificial sequence
  Synthetic oligonucleotide
ttgatccccttgtctc

SEQ ID NO: 1513 - DNA, 16 bp, Artificial sequence
  Synthetic oligonucleotide
cgtgaggttgcagttg

SEQ ID NO: 1514 - DNA, 16 bp, Artificial sequence
  Synthetic oligonucleotide
tttcagacaaccccag

SEQ ID NO: 1515 - DNA, 16 bp, Artificial sequence
  Synthetic oligonucleotide
cctggatggatcgcag

SEQ ID NO: 1516 - DNA, 16 bp, Artificial sequence
  Synthetic oligonucleotide
ctgtgatgacaacaac

SEQ ID NO: 1517 - DNA, 16 bp, Artificial sequence
  Synthetic oligonucleotide
gggaatgatgatatga

SEQ ID NO: 1518 - DNA, 16 bp, Artificial sequence
  Synthetic oligonucleotide
atagtcaactagttct

SEQ ID NO: 1519 - DNA, 16 bp, Artificial sequence
  Synthetic oligonucleotide
aaggtttccccagatg

SEQ ID NO: 1520 - DNA, 16 bp, Artificial sequence
  Synthetic oligonucleotide
accgtatgattcagaa

SEQ ID NO: 1521 - DNA, 16 bp, Artificial sequence
  Synthetic oligonucleotide
tgtcattacacccaca

SEQ ID NO: 1522 - DNA, 16 bp, Artificial sequence
  Synthetic oligonucleotide
gacagtaaattagcca

SEQ ID NO: 1523 - DNA, 16 bp, Artificial sequence
  Synthetic oligonucleotide
atccattttacacacg

SEQ ID NO: 1524 - DNA, 16 bp, Artificial sequence
  Synthetic oligonucleotide
tgccttatcaaacttg

SEQ ID NO: 1525 - DNA, 16 bp, Artificial sequence
  Synthetic oligonucleotide
ctacttaataccttgt

SEQ ID NO: 1526 - DNA, 16 bp, Artificial sequence
  Synthetic oligonucleotide
ccaaaatccatacgct

SEQ ID NO: 1527 - DNA, 16 bp, Artificial sequence
  Synthetic oligonucleotide
gtgctatctagagaaa

SEQ ID NO: 1528 - DNA, 16 bp, Artificial sequence
  Synthetic oligonucleotide
aggtgccatctagagg

SEQ ID NO: 1529 - DNA, 16 bp, Artificial sequence
  Synthetic oligonucleotide
agtctgtcctcagagg

SEQ ID NO: 1530 - DNA, 16 bp, Artificial sequence
  Synthetic oligonucleotide
catacaaagcaagctc

SEQ ID NO: 1531 - DNA, 16 bp, Artificial sequence
  Synthetic oligonucleotide
aaatggaatatatcga

SEQ ID NO: 1532 - DNA, 16 bp, Artificial sequence
  Synthetic oligonucleotide
tgcagtaacatatcca

SEQ ID NO: 1533 - DNA, 16 bp, Artificial sequence
  Synthetic oligonucleotide
actatactttatccct

SEQ ID NO: 1534 - DNA, 16 bp, Artificial sequence
  Synthetic oligonucleotide
tcagaatacacctgac

SEQ ID NO: 1535 - DNA, 16 bp, Artificial sequence
  Synthetic oligonucleotide
agcatcagaacacatc

SEQ ID NO: 1536 - DNA, 16 bp, Artificial sequence
  Synthetic oligonucleotide
gctgaatgtacatata

SEQ ID NO: 1537 - DNA, 16 bp, Artificial sequence
  Synthetic oligonucleotide
ggaataacaagtaagc

SEQ ID NO: 1538 - DNA, 16 bp, Artificial sequence
  Synthetic oligonucleotide
aggcaattgggctgca

SEQ ID NO: 1539 - DNA, 16 bp, Artificial sequence
  Synthetic oligonucleotide
caggaggtaaaacatc

SEQ ID NO: 1540 - DNA, 16 bp, Artificial sequence
  Synthetic oligonucleotide
ctcctaaggcaatgca

SEQ ID NO: 1541 - DNA, 16 bp, Artificial sequence
  Synthetic oligonucleotide
tggattagtggattac

SEQ ID NO: 1542 - DNA, 16 bp, Artificial sequence
  Synthetic oligonucleotide
gcagagaagcacccct

SEQ ID NO: 1543 - DNA, 16 bp, Artificial sequence
  Synthetic oligonucleotide
gatatgtttacaccaa

SEQ ID NO: 1544 - DNA, 16 bp, Artificial sequence
  Synthetic oligonucleotide
gatataaataccaccc

SEQ ID NO: 1545 - DNA, 16 bp, Artificial sequence
  Synthetic oligonucleotide
atagatagggtgttat

SEQ ID NO: 1546 - DNA, 16 bp, Artificial sequence
  Synthetic oligonucleotide
aggctatacctaacac

SEQ ID NO: 1547 - DNA, 16 bp, Artificial sequence
  Synthetic oligonucleotide
aaccgaaagcagagca

SEQ ID NO: 1548 - DNA, 16 bp, Artificial sequence
  Synthetic oligonucleotide
attaactacctgccta

SEQ ID NO: 1549 - DNA, 16 bp, Artificial sequence
  Synthetic oligonucleotide
tattaagcaacggtta

SEQ ID NO: 1550 - DNA, 16 bp, Artificial sequence
  Synthetic oligonucleotide
tactaagctctcatcc

SEQ ID NO: 1551 - DNA, 16 bp, Artificial sequence
  Synthetic oligonucleotide
tctaaaatcactggtg

SEQ ID NO: 1552 - DNA, 16 bp, Artificial sequence
  Synthetic oligonucleotide
catgattgcgctgcca

SEQ ID NO: 1553 - DNA, 16 bp, Artificial sequence
  Synthetic oligonucleotide
gatggtaaggactcaa

SEQ ID NO: 1554 - DNA, 16 bp, Artificial sequence
  Synthetic oligonucleotide
gcaatatcctgacaca

SEQ ID NO: 1555 - DNA, 16 bp, Artificial sequence
  Synthetic oligonucleotide
catagcacataagatg

SEQ ID NO: 1556 - DNA, 16 bp, Artificial sequence
  Synthetic oligonucleotide
gagaaaacgggttgat

SEQ ID NO: 1557 - DNA, 16 bp, Artificial sequence
  Synthetic oligonucleotide
tagagttagatgaagt

SEQ ID NO: 1558 - DNA, 16 bp, Artificial sequence
  Synthetic oligonucleotide
tctcaatttggtggtg

SEQ ID NO: 1559 - DNA, 16 bp, Artificial sequence
  Synthetic oligonucleotide
gacaattaaacaggtc

SEQ ID NO: 1560 - DNA, 16 bp, Artificial sequence
  Synthetic oligonucleotide
aattgggctgcaccat

SEQ ID NO: 1561 - DNA, 16 bp, Artificial sequence
  Synthetic oligonucleotide
tttgtcccgttgatta

SEQ ID NO: 1562 - DNA, 16 bp, Artificial sequence
  Synthetic oligonucleotide
tccataaacaggattg

SEQ ID NO: 1563 - DNA, 16 bp, Artificial sequence
  Synthetic oligonucleotide
gaaagttctcctgttg

SEQ ID NO: 1564 - DNA, 16 bp, Artificial sequence
  Synthetic oligonucleotide
agataccaggcagtga

SEQ ID NO: 1565 - DNA, 16 bp, Artificial sequence
  Synthetic oligonucleotide
ctctaagtgcatctta

SEQ ID NO: 1566 - DNA, 16 bp, Artificial sequence
  Synthetic oligonucleotide
agatccacatggtctg

SEQ ID NO: 1567 - DNA, 16 bp, Artificial sequence
  Synthetic oligonucleotide
gatccacacggccatg

SEQ ID NO: 1568 - DNA, 16 bp, Artificial sequence
  Synthetic oligonucleotide
cttcggctcatctctt

SEQ ID NO: 1569 - DNA, 16 bp, Artificial sequence
  Synthetic oligonucleotide
gtaaacccatccactc

SEQ ID NO: 1570 - DNA, 16 bp, Artificial sequence
  Synthetic oligonucleotide
cgtactttctgtactt

SEQ ID NO: 1571 - DNA, 16 bp, Artificial sequence
  Synthetic oligonucleotide
ccttgatgagacgcag

SEQ ID NO: 1572 - DNA, 16 bp, Artificial sequence
  Synthetic oligonucleotide
ctgtgtcacaaggctc

SEQ ID NO: 1573 - DNA, 16 bp, Artificial sequence
  Synthetic oligonucleotide
gtcaaaggcaccttgc

SEQ ID NO: 1574 - DNA, 16 bp, Artificial sequence
  Synthetic oligonucleotide
tggcctcggagaaacc

SEQ ID NO: 1575 - DNA, 16 bp, Artificial sequence
  Synthetic oligonucleotide
gattcctgaggtcgga

SEQ ID NO: 1576 - DNA, 16 bp, Artificial sequence
  Synthetic oligonucleotide
gaagcttcaaacgact

SEQ ID NO: 1577 - DNA, 16 bp, Artificial sequence
  Synthetic oligonucleotide
tcctggtttaccaggc

SEQ ID NO: 1578 - DNA, 16 bp, Artificial sequence
  Synthetic oligonucleotide
tctgcagctttttagc

SEQ ID NO: 1579 - DNA, 16 bp, Artificial sequence
  Synthetic oligonucleotide
tctggtggagagattg

SEQ ID NO: 1580 - DNA, 16 bp, Artificial sequence
  Synthetic oligonucleotide
tgtcggccttcctttt

SEQ ID NO: 1581 - DNA, 16 bp, Artificial sequence
  Synthetic oligonucleotide
ttgggaggacacactg

SEQ ID NO: 1582 - DNA, 16 bp, Artificial sequence
  Synthetic oligonucleotide
ttcagttagactctgg

SEQ ID NO: 1583 - DNA, 16 bp, Artificial sequence
  Synthetic oligonucleotide
cagcactcatgcgaga

SEQ ID NO: 1584 - DNA, 16 bp, Artificial sequence
  Synthetic oligonucleotide
ctgacaacatgctgat

SEQ ID NO: 1585 - DNA, 16 bp, Artificial sequence
  Synthetic oligonucleotide
ctggtcagggaatggc

SEQ ID NO: 1586 - DNA, 16 bp, Artificial sequence
  Synthetic oligonucleotide
ttcacataaaattgcg

SEQ ID NO: 1587 - DNA, 16 bp, Artificial sequence
  Synthetic oligonucleotide
taaggccagaattcac

SEQ ID NO: 1588 - DNA, 16 bp, Artificial sequence
  Synthetic oligonucleotide
gattctgattagtgct

SEQ ID NO: 1589 - DNA, 16 bp, Artificial sequence
  Synthetic oligonucleotide
tttgatccccttgtct

SEQ ID NO: 1590 - DNA, 16 bp, Artificial sequence
  Synthetic oligonucleotide
gtggaaagatcccagc

SEQ ID NO: 1591 - DNA, 16 bp, Artificial sequence
  Synthetic oligonucleotide
atttcagacaacccca

SEQ ID NO: 1592 - DNA, 16 bp, Artificial sequence
  Synthetic oligonucleotide
gcctggatggatcgca

SEQ ID NO: 1593 - DNA, 16 bp, Artificial sequence
  Synthetic oligonucleotide
cctctaactgaggcgc

SEQ ID NO: 1594 - DNA, 16 bp, Artificial sequence
  Synthetic oligonucleotide
agcgggaatgatgata

SEQ ID NO: 1595 - DNA, 16 bp, Artificial sequence
  Synthetic oligonucleotide
atatagtcaactagtt

SEQ ID NO: 1596 - DNA, 16 bp, Artificial sequence
  Synthetic oligonucleotide
gaagaaaggtttcccc

SEQ ID NO: 1597 - DNA, 16 bp, Artificial sequence
  Synthetic oligonucleotide
ttaacagaattaccgt

SEQ ID NO: 1598 - DNA, 16 bp, Artificial sequence
  Synthetic oligonucleotide
ataagtactgacacaa

SEQ ID NO: 1599 - DNA, 16 bp, Artificial sequence
  Synthetic oligonucleotide
cctaactaatgtttgc

SEQ ID NO: 1600 - DNA, 16 bp, Artificial sequence
  Synthetic oligonucleotide
gctaagaaaggtcacc

SEQ ID NO: 1601 - DNA, 16 bp, Artificial sequence
  Synthetic oligonucleotide
aagtaatctgcatcct

SEQ ID NO: 1602 - DNA, 16 bp, Artificial sequence
  Synthetic oligonucleotide
cctacttaataccttg

SEQ ID NO: 1603 - DNA, 16 bp, Artificial sequence
  Synthetic oligonucleotide
cccaaaatccatacgc

SEQ ID NO: 1604 - DNA, 16 bp, Artificial sequence
  Synthetic oligonucleotide
ggtgctatctagagaa

SEQ ID NO: 1605 - DNA, 16 bp, Artificial sequence
  Synthetic oligonucleotide
caggtgccatctagag

SEQ ID NO: 1606 - DNA, 16 bp, Artificial sequence
  Synthetic oligonucleotide
atcagagtctgtcctc

SEQ ID NO: 1607 - DNA, 16 bp, Artificial sequence
  Synthetic oligonucleotide
ctaatagatgctcagg

SEQ ID NO: 1608 - DNA, 16 bp, Artificial sequence
  Synthetic oligonucleotide
gaaatggaatatatcg

SEQ ID NO: 1609 - DNA, 16 bp, Artificial sequence
  Synthetic oligonucleotide
gtaaaagcccagacac

SEQ ID NO: 1610 - DNA, 16 bp, Artificial sequence
  Synthetic oligonucleotide
gattagtttccccgtc

SEQ ID NO: 1611 - DNA, 16 bp, Artificial sequence
  Synthetic oligonucleotide
atcagaatacacctga

SEQ ID NO: 1612 - DNA, 16 bp, Artificial sequence
  Synthetic oligonucleotide
aacacacctgaccaga

SEQ ID NO: 1613 - DNA, 16 bp, Artificial sequence
  Synthetic oligonucleotide
agcataatgtccccga

SEQ ID NO: 1614 - DNA, 16 bp, Artificial sequence
  Synthetic oligonucleotide
gtggaataacaagtaa

SEQ ID NO: 1615 - DNA, 16 bp, Artificial sequence
  Synthetic oligonucleotide
ctattcatgtgagtgt

SEQ ID NO: 1616 - DNA, 16 bp, Artificial sequence
  Synthetic oligonucleotide
ccatagttctctgcaa

SEQ ID NO: 1617 - DNA, 16 bp, Artificial sequence
  Synthetic oligonucleotide
ccattagcaacatctc

SEQ ID NO: 1618 - DNA, 16 bp, Artificial sequence
  Synthetic oligonucleotide
aattatggattagtgg

SEQ ID NO: 1619 - DNA, 16 bp, Artificial sequence
  Synthetic oligonucleotide
agcagagaagcacccc

SEQ ID NO: 1620 - DNA, 16 bp, Artificial sequence
  Synthetic oligonucleotide
tatgatatgtttacac

SEQ ID NO: 1621 - DNA, 16 bp, Artificial sequence
  Synthetic oligonucleotide
gtattacaaatgcaac

SEQ ID NO: 1622 - DNA, 16 bp, Artificial sequence
  Synthetic oligonucleotide
caatagatagggtgtt

SEQ ID NO: 1623 - DNA, 16 bp, Artificial sequence
  Synthetic oligonucleotide
cacataggctatacct

SEQ ID NO: 1624 - DNA, 16 bp, Artificial sequence
  Synthetic oligonucleotide
agtggtagagggaacc

SEQ ID NO: 1625 - DNA, 16 bp, Artificial sequence
  Synthetic oligonucleotide
tattaactacctgcct

SEQ ID NO: 1626 - DNA, 16 bp, Artificial sequence
  Synthetic oligonucleotide
gtaactattaagcaac

SEQ ID NO: 1627 - DNA, 16 bp, Artificial sequence
  Synthetic oligonucleotide
ctactaagctctcatc

SEQ ID NO: 1628 - DNA, 16 bp, Artificial sequence
  Synthetic oligonucleotide
ctctaaaatcactggt

SEQ ID NO: 1629 - DNA, 16 bp, Artificial sequence
  Synthetic oligonucleotide
gctgatttaaacatca

SEQ ID NO: 1630 - DNA, 16 bp, Artificial sequence
  Synthetic oligonucleotide
gaaaactgtgatggta

SEQ ID NO: 1631 - DNA, 16 bp, Artificial sequence
  Synthetic oligonucleotide
ggcaatatcctgacac

SEQ ID NO: 1632 - DNA, 16 bp, Artificial sequence
  Synthetic oligonucleotide
gactaatggaatttat

SEQ ID NO: 1633 - DNA, 16 bp, Artificial sequence
  Synthetic oligonucleotide
ctgagaaaacgggttg

SEQ ID NO: 1634 - DNA, 16 bp, Artificial sequence
  Synthetic oligonucleotide
gttagagttagatgaa

SEQ ID NO: 1635 - DNA, 16 bp, Artificial sequence
  Synthetic oligonucleotide
ctaataaatccaccca

SEQ ID NO: 1636 - DNA, 16 bp, Artificial sequence
  Synthetic oligonucleotide
attacccaagttcgac

SEQ ID NO: 1637 - DNA, 16 bp, Artificial sequence
  Synthetic oligonucleotide
aagcaccaccccagtc

SEQ ID NO: 1638 - DNA, 16 bp, Artificial sequence
  Synthetic oligonucleotide
ttttgtcccgttgatt

SEQ ID NO: 1639 - DNA, 16 bp, Artificial sequence
  Synthetic oligonucleotide
atccataaacaggatt

SEQ ID NO: 1640 - DNA, 16 bp, Artificial sequence
  Synthetic oligonucleotide
taccagaaagttctcc

SEQ ID NO: 1641 - DNA, 16 bp, Artificial sequence
  Synthetic oligonucleotide
aagataccaggcagtg

SEQ ID NO: 1642 - DNA, 16 bp, Artificial sequence
  Synthetic oligonucleotide
cctctaagtgcatctt

SEQ ID NO: 1643 - DNA, 16 bp, Artificial sequence
  Synthetic oligonucleotide
tagatccacatggtct

SEQ ID NO: 1644 - DNA, 16 bp, Artificial sequence
  Synthetic oligonucleotide
agatccacacggccat

SEQ ID NO: 1645 - DNA, 16 bp, Artificial sequence
  Synthetic oligonucleotide
ccacttcggctcatct

SEQ ID NO: 1646 - DNA, 16 bp, Artificial sequence
  Synthetic oligonucleotide
agtaaacccatccact

SEQ ID NO: 1647 - DNA, 16 bp, Artificial sequence
  Synthetic oligonucleotide
gaatctgcttctcacg

SEQ ID NO: 1648 - DNA, 16 bp, Artificial sequence
  Synthetic oligonucleotide
tccttgatgagacgca

SEQ ID NO: 1649 - DNA, 16 bp, Artificial sequence
  Synthetic oligonucleotide
tctgtgtcacaaggct

SEQ ID NO: 1650 - DNA, 16 bp, Artificial sequence
  Synthetic oligonucleotide
cggtcctatgtgctcg

SEQ ID NO: 1651 - DNA, 16 bp, Artificial sequence
  Synthetic oligonucleotide
tttccttttggcctcg

SEQ ID NO: 1652 - DNA, 16 bp, Artificial sequence
  Synthetic oligonucleotide
atgattcctgaggtcg

SEQ ID NO: 1653 - DNA, 16 bp, Artificial sequence
  Synthetic oligonucleotide
ggaagcttcaaacgac

SEQ ID NO: 1654 - DNA, 16 bp, Artificial sequence
  Synthetic oligonucleotide
ctcctggtttaccagg

SEQ ID NO: 1655 - DNA, 16 bp, Artificial sequence
  Synthetic oligonucleotide
ggatctgcagcttttt

SEQ ID NO: 1656 - DNA, 16 bp, Artificial sequence
  Synthetic oligonucleotide
tccattctggtggaga

SEQ ID NO: 1657 - DNA, 16 bp, Artificial sequence
  Synthetic oligonucleotide
gtgtcggccttccttt

SEQ ID NO: 1658 - DNA, 16 bp, Artificial sequence
  Synthetic oligonucleotide
cttgggaggacacact

SEQ ID NO: 1659 - DNA, 16 bp, Artificial sequence
  Synthetic oligonucleotide
attcagttagactctg

SEQ ID NO: 1660 - DNA, 16 bp, Artificial sequence
  Synthetic oligonucleotide
gatgtcgaagcagcac

SEQ ID NO: 1661 - DNA, 16 bp, Artificial sequence
  Synthetic oligonucleotide
atcctgacaacatgct

SEQ ID NO: 1662 - DNA, 16 bp, Artificial sequence
  Synthetic oligonucleotide
tctggtcagggaatgg

SEQ ID NO: 1663 - DNA, 16 bp, Artificial sequence
  Synthetic oligonucleotide
gtggattcttggcttt

SEQ ID NO: 1664 - DNA, 16 bp, Artificial sequence
  Synthetic oligonucleotide
gtaaggccagaattca

SEQ ID NO: 1665 - DNA, 16 bp, Artificial sequence
  Synthetic oligonucleotide
agattctgattagtgc

SEQ ID NO: 1666 - DNA, 16 bp, Artificial sequence
  Synthetic oligonucleotide
gtttgatccccttgtc

SEQ ID NO: 1667 - DNA, 16 bp, Artificial sequence
  Synthetic oligonucleotide
gtgtggaaagatccca

SEQ ID NO: 1668 - DNA, 16 bp, Artificial sequence
  Synthetic oligonucleotide
catttcagacaacccc

SEQ ID NO: 1669 - DNA, 16 bp, Artificial sequence
  Synthetic oligonucleotide
cggaaggatcacagag

SEQ ID NO: 1670 - DNA, 16 bp, Artificial sequence
  Synthetic oligonucleotide
tcctctaactgaggcg

SEQ ID NO: 1671 - DNA, 16 bp, Artificial sequence
  Synthetic oligonucleotide
tagaaagatagcggga

SEQ ID NO: 1672 - DNA, 16 bp, Artificial sequence
  Synthetic oligonucleotide
tatatagtcaactagt

SEQ ID NO: 1673 - DNA, 16 bp, Artificial sequence
  Synthetic oligonucleotide
ggaaaattgtacacta

SEQ ID NO: 1674 - DNA, 16 bp, Artificial sequence
  Synthetic oligonucleotide
cagtagagcagttctt

SEQ ID NO: 1675 - DNA, 16 bp, Artificial sequence
  Synthetic oligonucleotide
atataagtactgacac

SEQ ID NO: 1676 - DNA, 16 bp, Artificial sequence
  Synthetic oligonucleotide
caggaatctacaagta

SEQ ID NO: 1677 - DNA, 16 bp, Artificial sequence
  Synthetic oligonucleotide
ctatatccccaacacg

SEQ ID NO: 1678 - DNA, 16 bp, Artificial sequence
  Synthetic oligonucleotide
ttaagtaatctgcatc

SEQ ID NO: 1679 - DNA, 16 bp, Artificial sequence
  Synthetic oligonucleotide
aggcaatcctacatcc

SEQ ID NO: 1680 - DNA, 16 bp, Artificial sequence
  Synthetic oligonucleotide
aatgagtagttctgcc

SEQ ID NO: 1681 - DNA, 16 bp, Artificial sequence
  Synthetic oligonucleotide
aggtgctatctagaga

SEQ ID NO: 1682 - DNA, 16 bp, Artificial sequence
  Synthetic oligonucleotide
gcaggtgccatctaga

SEQ ID NO: 1683 - DNA, 16 bp, Artificial sequence
  Synthetic oligonucleotide
aatcagagtctgtcct

SEQ ID NO: 1684 - DNA, 16 bp, Artificial sequence
  Synthetic oligonucleotide
tttctaatagatgctc

SEQ ID NO: 1685 - DNA, 16 bp, Artificial sequence
  Synthetic oligonucleotide
tatgaacatggcccat

SEQ ID NO: 1686 - DNA, 16 bp, Artificial sequence
  Synthetic oligonucleotide
gacactagagcctcag

SEQ ID NO: 1687 - DNA, 16 bp, Artificial sequence
  Synthetic oligonucleotide
ttgattagtttccccg

SEQ ID NO: 1688 - DNA, 16 bp, Artificial sequence
  Synthetic oligonucleotide
catcagaatacacctg

SEQ ID NO: 1689 - DNA, 16 bp, Artificial sequence
  Synthetic oligonucleotide
gaacacacctgaccag

SEQ ID NO: 1690 - DNA, 16 bp, Artificial sequence
  Synthetic oligonucleotide
tagcataatgtccccg

SEQ ID NO: 1691 - DNA, 16 bp, Artificial sequence
  Synthetic oligonucleotide
ctatgtacacttctga

SEQ ID NO: 1692 - DNA, 16 bp, Artificial sequence
  Synthetic oligonucleotide
gactattcatgtgagt

SEQ ID NO: 1693 - DNA, 16 bp, Artificial sequence
  Synthetic oligonucleotide
aaccatagttctctgc

SEQ ID NO: 1694 - DNA, 16 bp, Artificial sequence
  Synthetic oligonucleotide
ccctgtagagagccca

SEQ ID NO: 1695 - DNA, 16 bp, Artificial sequence
  Synthetic oligonucleotide
taattatggattagtg

SEQ ID NO: 1696 - DNA, 16 bp, Artificial sequence
  Synthetic oligonucleotide
gagcagagaagcaccc

SEQ ID NO: 1697 - DNA, 16 bp, Artificial sequence
  Synthetic oligonucleotide
ctatgatatgtttaca

SEQ ID NO: 1698 - DNA, 16 bp, Artificial sequence
  Synthetic oligonucleotide
ctctaacagactaggc

SEQ ID NO: 1699 - DNA, 16 bp, Artificial sequence
  Synthetic oligonucleotide
tcaatagatagggtgt

SEQ ID NO: 1700 - DNA, 16 bp, Artificial sequence
  Synthetic oligonucleotide
acacataggctatacc

SEQ ID NO: 1701 - DNA, 16 bp, Artificial sequence
  Synthetic oligonucleotide
tttgaacaaagggtca

SEQ ID NO: 1702 - DNA, 16 bp, Artificial sequence
  Synthetic oligonucleotide
ttaagttaattggttg

SEQ ID NO: 1703 - DNA, 16 bp, Artificial sequence
  Synthetic oligonucleotide
tcatatccaaattgtg

SEQ ID NO: 1704 - DNA, 16 bp, Artificial sequence
  Synthetic oligonucleotide
tctactaagctctcat

SEQ ID NO: 1705 - DNA, 16 bp, Artificial sequence
  Synthetic oligonucleotide
gctctaaaatcactgg

SEQ ID NO: 1706 - DNA, 16 bp, Artificial sequence
  Synthetic oligonucleotide
aactaataatccccgt

SEQ ID NO: 1707 - DNA, 16 bp, Artificial sequence
  Synthetic oligonucleotide
aatgtaagtgtcatac

SEQ ID NO: 1708 - DNA, 16 bp, Artificial sequence
  Synthetic oligonucleotide
gaaaagtgcaatcatc

SEQ ID NO: 1709 - DNA, 16 bp, Artificial sequence
  Synthetic oligonucleotide
aatatggacagaagtc

SEQ ID NO: 1710 - DNA, 16 bp, Artificial sequence
  Synthetic oligonucleotide
cctgagaaaacgggtt

SEQ ID NO: 1711 - DNA, 16 bp, Artificial sequence
  Synthetic oligonucleotide
agttagagttagatga

SEQ ID NO: 1712 - DNA, 16 bp, Artificial sequence
  Synthetic oligonucleotide
actaataaatccaccc

SEQ ID NO: 1713 - DNA, 16 bp, Artificial sequence
  Synthetic oligonucleotide
gtataatgaaccccct

SEQ ID NO: 1714 - DNA, 16 bp, Artificial sequence
  Synthetic oligonucleotide
ccaagcacggagacac

SEQ ID NO: 1715 - DNA, 16 bp, Artificial sequence
  Synthetic oligonucleotide
tttttgtcccgttgat

SEQ ID NO: 1716 - DNA, 16 bp, Artificial sequence
  Synthetic oligonucleotide
ttccctatggagggaa

SEQ ID NO: 1717 - DNA, 16 bp, Artificial sequence
  Synthetic oligonucleotide
gcttaccagaaagttc

SEQ ID NO: 1718 - DNA, 16 bp, Artificial sequence
  Synthetic oligonucleotide
taagataccaggcagt

SEQ ID NO: 1719 - DNA, 16 bp, Artificial sequence
  Synthetic oligonucleotide
tcctctaagtgcatct

SEQ ID NO: 1720 - DNA, 16 bp, Artificial sequence
  Synthetic oligonucleotide
ctagatccacatggtc

SEQ ID NO: 1721 - DNA, 16 bp, Artificial sequence
  Synthetic oligonucleotide
aagatccacacggcca

SEQ ID NO: 1722 - DNA, 16 bp, Artificial sequence
  Synthetic oligonucleotide
cccacttcggctcatc

SEQ ID NO: 1723 - DNA, 16 bp, Artificial sequence
  Synthetic oligonucleotide
ccagtaaacccatcca

SEQ ID NO: 1724 - DNA, 16 bp, Artificial sequence
  Synthetic oligonucleotide
tgcactggaatctgct

SEQ ID NO: 1725 - DNA, 16 bp, Artificial sequence
  Synthetic oligonucleotide
ctccttgatgagacgc

SEQ ID NO: 1726 - DNA, 16 bp, Artificial sequence
  Synthetic oligonucleotide
ctctgtgtcacaaggc

SEQ ID NO: 1727 - DNA, 16 bp, Artificial sequence
  Synthetic oligonucleotide
cagtgcagagcggtcc

SEQ ID NO: 1728 - DNA, 16 bp, Artificial sequence
  Synthetic oligonucleotide
atcagagaagtacttg

SEQ ID NO: 1729 - DNA, 16 bp, Artificial sequence
  Synthetic oligonucleotide
gcagtccatgattcct

SEQ ID NO: 1730 - DNA, 16 bp, Artificial sequence
  Synthetic oligonucleotide
gggaagcttcaaacga

SEQ ID NO: 1731 - DNA, 16 bp, Artificial sequence
  Synthetic oligonucleotide
tctcctggtttaccag

SEQ ID NO: 1732 - DNA, 16 bp, Artificial sequence
  Synthetic oligonucleotide
tggatctgcagctttt

SEQ ID NO: 1733 - DNA, 16 bp, Artificial sequence
  Synthetic oligonucleotide
ggtccattctggtgga

SEQ ID NO: 1734 - DNA, 16 bp, Artificial sequence
  Synthetic oligonucleotide
ggtgtcggccttcctt

SEQ ID NO: 1735 - DNA, 16 bp, Artificial sequence
  Synthetic oligonucleotide
gagcttgggaggacac

SEQ ID NO: 1736 - DNA, 16 bp, Artificial sequence
  Synthetic oligonucleotide
actgaggtccaattca

SEQ ID NO: 1737 - DNA, 16 bp, Artificial sequence
  Synthetic oligonucleotide
aggagatgtcgaagca

SEQ ID NO: 1738 - DNA, 16 bp, Artificial sequence
  Synthetic oligonucleotide
gatcctgacaacatgc

SEQ ID NO: 1739 - DNA, 16 bp, Artificial sequence
  Synthetic oligonucleotide
gtctggtcagggaatg

SEQ ID NO: 1740 - DNA, 16 bp, Artificial sequence
  Synthetic oligonucleotide
tgtggattcttggctt

SEQ ID NO: 1741 - DNA, 16 bp, Artificial sequence
  Synthetic oligonucleotide
gaacaacagactgacg

SEQ ID NO: 1742 - DNA, 16 bp, Artificial sequence
  Synthetic oligonucleotide
gagattctgattagtg

SEQ ID NO: 1743 - DNA, 16 bp, Artificial sequence
  Synthetic oligonucleotide
agtttgatccccttgt

SEQ ID NO: 1744 - DNA, 16 bp, Artificial sequence
  Synthetic oligonucleotide
agtgtggaaagatccc

SEQ ID NO: 1745 - DNA, 16 bp, Artificial sequence
  Synthetic oligonucleotide
tacatttcagacaacc

SEQ ID NO: 1746 - DNA, 16 bp, Artificial sequence
  Synthetic oligonucleotide
tccaccggaaggatca

SEQ ID NO: 1747 - DNA, 16 bp, Artificial sequence
  Synthetic oligonucleotide
gaacatcctctaactg

SEQ ID NO: 1748 - DNA, 16 bp, Artificial sequence
  Synthetic oligonucleotide
atagaaagatagcggg

SEQ ID NO: 1749 - DNA, 16 bp, Artificial sequence
  Synthetic oligonucleotide
gctacaaaaagcatgg

SEQ ID NO: 1750 - DNA, 16 bp, Artificial sequence
  Synthetic oligonucleotide
gcacaatgtgagtgta

SEQ ID NO: 1751 - DNA, 16 bp, Artificial sequence
  Synthetic oligonucleotide
aacagtagagcagttc

SEQ ID NO: 1752 - DNA, 16 bp, Artificial sequence
  Synthetic oligonucleotide
tatataagtactgaca

SEQ ID NO: 1753 - DNA, 16 bp, Artificial sequence
  Synthetic oligonucleotide
gataacttcaggtggg

SEQ ID NO: 1754 - DNA, 16 bp, Artificial sequence
  Synthetic oligonucleotide
agcaaacatgcgaagc

SEQ ID NO: 1755 - DNA, 16 bp, Artificial sequence
  Synthetic oligonucleotide
cctttaagtaatctgc

SEQ ID NO: 1756 - DNA, 16 bp, Artificial sequence
  Synthetic oligonucleotide
tatttgtaggcaatcc

SEQ ID NO: 1757 - DNA, 16 bp, Artificial sequence
  Synthetic oligonucleotide
ttaatgagtagttctg

SEQ ID NO: 1758 - DNA, 16 bp, Artificial sequence
  Synthetic oligonucleotide
gaaggtgctatctaga

SEQ ID NO: 1759 - DNA, 16 bp, Artificial sequence
  Synthetic oligonucleotide
ggcaggtgccatctag

SEQ ID NO: 1760 - DNA, 16 bp, Artificial sequence
  Synthetic oligonucleotide
caatcagagtctgtcc

SEQ ID NO: 1761 - DNA, 16 bp, Artificial sequence
  Synthetic oligonucleotide
taagattgggtccaca

SEQ ID NO: 1762 - DNA, 16 bp, Artificial sequence
  Synthetic oligonucleotide
ctatgaacatggccca

SEQ ID NO: 1763 - DNA, 16 bp, Artificial sequence
  Synthetic oligonucleotide
atccatagagcatgga

SEQ ID NO: 1764 - DNA, 16 bp, Artificial sequence
  Synthetic oligonucleotide
cttgattagtttcccc

SEQ ID NO: 1765 - DNA, 16 bp, Artificial sequence
  Synthetic oligonucleotide
gaatagagaaagcatc

SEQ ID NO: 1766 - DNA, 16 bp, Artificial sequence
  Synthetic oligonucleotide
agaacacacctgacca

SEQ ID NO: 1767 - DNA, 16 bp, Artificial sequence
  Synthetic oligonucleotide
agcttatcttacttag

SEQ ID NO: 1768 - DNA, 16 bp, Artificial sequence
  Synthetic oligonucleotide
ctctatgtacacttct

SEQ ID NO: 1769 - DNA, 16 bp, Artificial sequence
  Synthetic oligonucleotide
acataaaatgggtgac

SEQ ID NO: 1770 - DNA, 16 bp, Artificial sequence
  Synthetic oligonucleotide
gaaaccatagttctct

SEQ ID NO: 1771 - DNA, 16 bp, Artificial sequence
  Synthetic oligonucleotide
atgaagaagccctgta

SEQ ID NO: 1772 - DNA, 16 bp, Artificial sequence
  Synthetic oligonucleotide
ttaattatggattagt

SEQ ID NO: 1773 - DNA, 16 bp, Artificial sequence
  Synthetic oligonucleotide
ctccaatgtcacccgc

SEQ ID NO: 1774 - DNA, 16 bp, Artificial sequence
  Synthetic oligonucleotide
actatgatatgtttac

SEQ ID NO: 1775 - DNA, 16 bp, Artificial sequence
  Synthetic oligonucleotide
attacagtagctctaa

SEQ ID NO: 1776 - DNA, 16 bp, Artificial sequence
  Synthetic oligonucleotide
gtttcaatagataggg

SEQ ID NO: 1777 - DNA, 16 bp, Artificial sequence
  Synthetic oligonucleotide
aacacataggctatac

SEQ ID NO: 1778 - DNA, 16 bp, Artificial sequence
  Synthetic oligonucleotide
ctaagatgtcactctg

SEQ ID NO: 1779 - DNA, 16 bp, Artificial sequence
  Synthetic oligonucleotide
tattaagttaattggt

SEQ ID NO: 1780 - DNA, 16 bp, Artificial sequence
  Synthetic oligonucleotide
gaaattgcaacagacg

SEQ ID NO: 1781 - DNA, 16 bp, Artificial sequence
  Synthetic oligonucleotide
aagttttgagtggctt

SEQ ID NO: 1782 - DNA, 16 bp, Artificial sequence
  Synthetic oligonucleotide
agcataagagctctaa

SEQ ID NO: 1783 - DNA, 16 bp, Artificial sequence
  Synthetic oligonucleotide
tcaactaataatcccc

SEQ ID NO: 1784 - DNA, 16 bp, Artificial sequence
  Synthetic oligonucleotide
taccaaattctgtgcc

SEQ ID NO: 1785 - DNA, 16 bp, Artificial sequence
  Synthetic oligonucleotide
ctgagtagaaggatct

SEQ ID NO: 1786 - DNA, 16 bp, Artificial sequence
  Synthetic oligonucleotide
cacaaggatgcaaggc

SEQ ID NO: 1787 - DNA, 16 bp, Artificial sequence
  Synthetic oligonucleotide
cttgttatcgcagcct

SEQ ID NO: 1788 - DNA, 16 bp, Artificial sequence
  Synthetic oligonucleotide
agtagttagagttaga

SEQ ID NO: 1789 - DNA, 16 bp, Artificial sequence
  Synthetic oligonucleotide
cttaactaataaatcc

SEQ ID NO: 1790 - DNA, 16 bp, Artificial sequence
  Synthetic oligonucleotide
aactatctagttggga

SEQ ID NO: 1791 - DNA, 16 bp, Artificial sequence
  Synthetic oligonucleotide
agacacctcctataag

SEQ ID NO: 1792 - DNA, 16 bp, Artificial sequence
  Synthetic oligonucleotide
gaaaatttttgtcccg

SEQ ID NO: 1793 - DNA, 16 bp, Artificial sequence
  Synthetic oligonucleotide
gtttccctatggaggg

SEQ ID NO: 1794 - DNA, 16 bp, Artificial sequence
  Synthetic oligonucleotide
tgcttaccagaaagtt

SEQ ID NO: 1795 - DNA, 16 bp, Artificial sequence
  Synthetic oligonucleotide
ctaagataccaggcag

SEQ ID NO: 1796 - DNA, 16 bp, Artificial sequence
  Synthetic oligonucleotide
gtcctctaagtgcatc

SEQ ID NO: 1797 - DNA, 16 bp, Artificial sequence
  Synthetic oligonucleotide
gctagatccacatggt

SEQ ID NO: 1798 - DNA, 16 bp, Artificial sequence
  Synthetic oligonucleotide
gaagatccacacggcc

SEQ ID NO: 1799 - DNA, 16 bp, Artificial sequence
  Synthetic oligonucleotide
ccccacttcggctcat

SEQ ID NO: 1800 - DNA, 16 bp, Artificial sequence
  Synthetic oligonucleotide
tccagtaaacccatcc

SEQ ID NO: 1801 - DNA, 16 bp, Artificial sequence
  Synthetic oligonucleotide
atgcactggaatctgc

SEQ ID NO: 1802 - DNA, 16 bp, Artificial sequence
  Synthetic oligonucleotide
ggtgctccttgatgag

SEQ ID NO: 1803 - DNA, 16 bp, Artificial sequence
  Synthetic oligonucleotide
cctctgtgtcacaagg

SEQ ID NO: 1804 - DNA, 16 bp, Artificial sequence
  Synthetic oligonucleotide
tcagtgcagagcggtc

SEQ ID NO: 1805 - DNA, 16 bp, Artificial sequence
  Synthetic oligonucleotide
catcagagaagtactt

SEQ ID NO: 1806 - DNA, 16 bp, Artificial sequence
  Synthetic oligonucleotide
tgcagtccatgattcc

SEQ ID NO: 1807 - DNA, 16 bp, Artificial sequence
  Synthetic oligonucleotide
tgggaagcttcaaacg

SEQ ID NO: 1808 - DNA, 16 bp, Artificial sequence
  Synthetic oligonucleotide
gtcctctcctggttta

SEQ ID NO: 1809 - DNA, 16 bp, Artificial sequence
  Synthetic oligonucleotide
ctggatctgcagcttt

SEQ ID NO: 1810 - DNA, 16 bp, Artificial sequence
  Synthetic oligonucleotide
tggtccattctggtgg

SEQ ID NO: 1811 - DNA, 16 bp, Artificial sequence
  Synthetic oligonucleotide
aggtgtcggccttcct

SEQ ID NO: 1812 - DNA, 16 bp, Artificial sequence
  Synthetic oligonucleotide
aggagcttgggaggac

SEQ ID NO: 1813 - DNA, 16 bp, Artificial sequence
  Synthetic oligonucleotide
gaattgtcactgaggt

SEQ ID NO: 1814 - DNA, 16 bp, Artificial sequence
  Synthetic oligonucleotide
caaggagatgtcgaag

SEQ ID NO: 1815 - DNA, 16 bp, Artificial sequence
  Synthetic oligonucleotide
aagatcctgacaacat

SEQ ID NO: 1816 - DNA, 16 bp, Artificial sequence
  Synthetic oligonucleotide
gagtctggtcagggaa

SEQ ID NO: 1817 - DNA, 16 bp, Artificial sequence
  Synthetic oligonucleotide
ctgtggattcttggct

SEQ ID NO: 1818 - DNA, 16 bp, Artificial sequence
  Synthetic oligonucleotide
tgaacaacagactgac

SEQ ID NO: 1819 - DNA, 16 bp, Artificial sequence
  Synthetic oligonucleotide
gtgagattctgattag

SEQ ID NO: 1820 - DNA, 16 bp, Artificial sequence
  Synthetic oligonucleotide
tagtttgatccccttg

SEQ ID NO: 1821 - DNA, 16 bp, Artificial sequence
  Synthetic oligonucleotide
aagtgtggaaagatcc

SEQ ID NO: 1822 - DNA, 16 bp, Artificial sequence
  Synthetic oligonucleotide
ctcataattgaaatac

SEQ ID NO: 1823 - DNA, 16 bp, Artificial sequence
  Synthetic oligonucleotide
tcttctccgacactcc

SEQ ID NO: 1824 - DNA, 16 bp, Artificial sequence
  Synthetic oligonucleotide
gaggaacatcctctaa

SEQ ID NO: 1825 - DNA, 16 bp, Artificial sequence
  Synthetic oligonucleotide
aatagaaagatagcgg

SEQ ID NO: 1826 - DNA, 16 bp, Artificial sequence
  Synthetic oligonucleotide
tttcaaccagctacaa

SEQ ID NO: 1827 - DNA, 16 bp, Artificial sequence
  Synthetic oligonucleotide
attcaatgggtgagga

SEQ ID NO: 1828 - DNA, 16 bp, Artificial sequence
  Synthetic oligonucleotide
ctaaaacagtagagca

SEQ ID NO: 1829 - DNA, 16 bp, Artificial sequence
  Synthetic oligonucleotide
agtatataagtactga

SEQ ID NO: 1830 - DNA, 16 bp, Artificial sequence
  Synthetic oligonucleotide
agataacttcaggtgg

SEQ ID NO: 1831 - DNA, 16 bp, Artificial sequence
  Synthetic oligonucleotide
atatttggcatgagag

SEQ ID NO: 1832 - DNA, 16 bp, Artificial sequence
  Synthetic oligonucleotide
gaatcaatcttattcc

SEQ ID NO: 1833 - DNA, 16 bp, Artificial sequence
  Synthetic oligonucleotide
caagtagcttacaaga

SEQ ID NO: 1834 - DNA, 16 bp, Artificial sequence
  Synthetic oligonucleotide
cttaatgagtagttct

SEQ ID NO: 1835 - DNA, 16 bp, Artificial sequence
  Synthetic oligonucleotide
ggaaggtgctatctag

SEQ ID NO: 1836 - DNA, 16 bp, Artificial sequence
  Synthetic oligonucleotide
aggcaggtgccatcta

SEQ ID NO: 1837 - DNA, 16 bp, Artificial sequence
  Synthetic oligonucleotide
ccaatcagagtctgtc

SEQ ID NO: 1838 - DNA, 16 bp, Artificial sequence
  Synthetic oligonucleotide
ctaagattgggtccac

SEQ ID NO: 1839 - DNA, 16 bp, Artificial sequence
  Synthetic oligonucleotide
atctatgaacatggcc

SEQ ID NO: 1840 - DNA, 16 bp, Artificial sequence
  Synthetic oligonucleotide
aaagggtaacatccat

SEQ ID NO: 1841 - DNA, 16 bp, Artificial sequence
  Synthetic oligonucleotide
catctatattgaaagg

SEQ ID NO: 1842 - DNA, 16 bp, Artificial sequence
  Synthetic oligonucleotide
cacacctgaccagaga

SEQ ID NO: 1843 - DNA, 16 bp, Artificial sequence
  Synthetic oligonucleotide
tcagaacacacctgac

SEQ ID NO: 1844 - DNA, 16 bp, Artificial sequence
  Synthetic oligonucleotide
ccctttcgagtctagc

SEQ ID NO: 1845 - DNA, 16 bp, Artificial sequence
  Synthetic oligonucleotide
gctctatgtacacttc

SEQ ID NO: 1846 - DNA, 16 bp, Artificial sequence
  Synthetic oligonucleotide
taacttgcatgcttgc

SEQ ID NO: 1847 - DNA, 16 bp, Artificial sequence
  Synthetic oligonucleotide
cttatgtaactgccaa

SEQ ID NO: 1848 - DNA, 16 bp, Artificial sequence
  Synthetic oligonucleotide
gatgaagaagccctgt

SEQ ID NO: 1849 - DNA, 16 bp, Artificial sequence
  Synthetic oligonucleotide
gttaattatggattag

SEQ ID NO: 1850 - DNA, 16 bp, Artificial sequence
  Synthetic oligonucleotide
gtggaatttggaacca

SEQ ID NO: 1851 - DNA, 16 bp, Artificial sequence
  Synthetic oligonucleotide
gtactatgatatgttt

SEQ ID NO: 1852 - DNA, 16 bp, Artificial sequence
  Synthetic oligonucleotide
gtttaagctgctctgt

SEQ ID NO: 1853 - DNA, 16 bp, Artificial sequence
  Synthetic oligonucleotide
tattatggttctagtt

SEQ ID NO: 1854 - DNA, 16 bp, Artificial sequence
  Synthetic oligonucleotide
taacacataggctata

SEQ ID NO: 1855 - DNA, 16 bp, Artificial sequence
  Synthetic oligonucleotide
aagctaagatgtcact

SEQ ID NO: 1856 - DNA, 16 bp, Artificial sequence
  Synthetic oligonucleotide
gtattaagttaattgg

SEQ ID NO: 1857 - DNA, 16 bp, Artificial sequence
  Synthetic oligonucleotide
gtagaaattgcaacag

SEQ ID NO: 1858 - DNA, 16 bp, Artificial sequence
  Synthetic oligonucleotide
agcaagttttgagtgg

SEQ ID NO: 1859 - DNA, 16 bp, Artificial sequence
  Synthetic oligonucleotide
gagcataagagctcta

SEQ ID NO: 1860 - DNA, 16 bp, Artificial sequence
  Synthetic oligonucleotide
ctcaactaataatccc

SEQ ID NO: 1861 - DNA, 16 bp, Artificial sequence
  Synthetic oligonucleotide
gttcattgatttacca

SEQ ID NO: 1862 - DNA, 16 bp, Artificial sequence
  Synthetic oligonucleotide
acatatcatgaagcca

SEQ ID NO: 1863 - DNA, 16 bp, Artificial sequence
  Synthetic oligonucleotide
gcacaaggatgcaagg

SEQ ID NO: 1864 - DNA, 16 bp, Artificial sequence
  Synthetic oligonucleotide
ctaaagcagcttgtta

SEQ ID NO: 1865 - DNA, 16 bp, Artificial sequence
  Synthetic oligonucleotide
gaagtagttagagtta

SEQ ID NO: 1866 - DNA, 16 bp, Artificial sequence
  Synthetic oligonucleotide
gcaacttaactaataa

SEQ ID NO: 1867 - DNA, 16 bp, Artificial sequence
  Synthetic oligonucleotide
tttaactatctagttg

SEQ ID NO: 1868 - DNA, 16 bp, Artificial sequence
  Synthetic oligonucleotide
ggcctagaaagagggt

SEQ ID NO: 1869 - DNA, 16 bp, Artificial sequence
  Synthetic oligonucleotide
gacccatcagcaagaa

SEQ ID NO: 1870 - DNA, 16 bp, Artificial sequence
  Synthetic oligonucleotide
ggtttccctatggagg

SEQ ID NO: 1871 - DNA, 16 bp, Artificial sequence
  Synthetic oligonucleotide
ccaaatgcttaccaga

SEQ ID NO: 1872 - DNA, 16 bp, Artificial sequence
  Synthetic oligonucleotide
cactaagataccaggc

SEQ ID NO: 1873 - DNA, 16 bp, Artificial sequence
  Synthetic oligonucleotide
agtcctctaagtgcat

SEQ ID NO: 1874 - DNA, 16 bp, Artificial sequence
  Synthetic oligonucleotide
ggctagatccacatgg

SEQ ID NO: 1875 - DNA, 16 bp, Artificial sequence
  Synthetic oligonucleotide
cgaagatccacacggc

SEQ ID NO: 1876 - DNA, 16 bp, Artificial sequence
  Synthetic oligonucleotide
ctgaaccccacttcgg

SEQ ID NO: 1877 - DNA, 16 bp, Artificial sequence
  Synthetic oligonucleotide
ctccagtaaacccatc

SEQ ID NO: 1878 - DNA, 16 bp, Artificial sequence
  Synthetic oligonucleotide
aatgcactggaatctg

SEQ ID NO: 1879 - DNA, 16 bp, Artificial sequence
  Synthetic oligonucleotide
tgccgatggccagaag

SEQ ID NO: 1880 - DNA, 16 bp, Artificial sequence
  Synthetic oligonucleotide
atgatcaggtccccca

SEQ ID NO: 1881 - DNA, 16 bp, Artificial sequence
  Synthetic oligonucleotide
gtcagtgcagagcggt

SEQ ID NO: 1882 - DNA, 16 bp, Artificial sequence
  Synthetic oligonucleotide
ctcatcagagaagtac

SEQ ID NO: 1883 - DNA, 16 bp, Artificial sequence
  Synthetic oligonucleotide
atccgccttctgcagt

SEQ ID NO: 1884 - DNA, 16 bp, Artificial sequence
  Synthetic oligonucleotide
cggctgggaagcttca

SEQ ID NO: 1885 - DNA, 16 bp, Artificial sequence
  Synthetic oligonucleotide
ggtcctctcctggttt

SEQ ID NO: 1886 - DNA, 16 bp, Artificial sequence
  Synthetic oligonucleotide
aacaattccagctggc

SEQ ID NO: 1887 - DNA, 16 bp, Artificial sequence
  Synthetic oligonucleotide
gtggtccattctggtg

SEQ ID NO: 1888 - DNA, 16 bp, Artificial sequence
  Synthetic oligonucleotide
aaggtgtcggccttcc

SEQ ID NO: 1889 - DNA, 16 bp, Artificial sequence
  Synthetic oligonucleotide
catgagaggagcttgg

SEQ ID NO: 1890 - DNA, 16 bp, Artificial sequence
  Synthetic oligonucleotide
agaattgtcactgagg

SEQ ID NO: 1891 - DNA, 16 bp, Artificial sequence
  Synthetic oligonucleotide
ggaccaaggagatgtc

SEQ ID NO: 1892 - DNA, 16 bp, Artificial sequence
  Synthetic oligonucleotide
caagatcctgacaaca

SEQ ID NO: 1893 - DNA, 16 bp, Artificial sequence
  Synthetic oligonucleotide
tagagtctggtcaggg

SEQ ID NO: 1894 - DNA, 16 bp, Artificial sequence
  Synthetic oligonucleotide
actgtggattcttggc

SEQ ID NO: 1895 - DNA, 16 bp, Artificial sequence
  Synthetic oligonucleotide
gctgaacaacagactg

SEQ ID NO: 1896 - DNA, 16 bp, Artificial sequence
  Synthetic oligonucleotide
cgtgagattctgatta

SEQ ID NO: 1897 - DNA, 16 bp, Artificial sequence
  Synthetic oligonucleotide
gtagtttgatcccctt

SEQ ID NO: 1898 - DNA, 16 bp, Artificial sequence
  Synthetic oligonucleotide
ggtcagaagtgtggaa

SEQ ID NO: 1899 - DNA, 16 bp, Artificial sequence
  Synthetic oligonucleotide
gtctcataattgaaat

SEQ ID NO: 1900 - DNA, 16 bp, Artificial sequence
  Synthetic oligonucleotide
caagctctcttctccg

SEQ ID NO: 1901 - DNA, 16 bp, Artificial sequence
  Synthetic oligonucleotide
agaggaacatcctcta

SEQ ID NO: 1902 - DNA, 16 bp, Artificial sequence
  Synthetic oligonucleotide
taatagaaagatagcg

SEQ ID NO: 1903 - DNA, 16 bp, Artificial sequence
  Synthetic oligonucleotide
attttcaaccagctac

SEQ ID NO: 1904 - DNA, 16 bp, Artificial sequence
  Synthetic oligonucleotide
tatcattcaatgggtg

SEQ ID NO: 1905 - DNA, 16 bp, Artificial sequence
  Synthetic oligonucleotide
tctaaaacagtagagc

SEQ ID NO: 1906 - DNA, 16 bp, Artificial sequence
  Synthetic oligonucleotide
gattatgacactttca

SEQ ID NO: 1907 - DNA, 16 bp, Artificial sequence
  Synthetic oligonucleotide
gacagataacttcagg

SEQ ID NO: 1908 - DNA, 16 bp, Artificial sequence
  Synthetic oligonucleotide
ctaatatttggcatga

SEQ ID NO: 1909 - DNA, 16 bp, Artificial sequence
  Synthetic oligonucleotide
cccaaagatcatttga

SEQ ID NO: 1910 - DNA, 16 bp, Artificial sequence
  Synthetic oligonucleotide
tccaagtagcttacaa

SEQ ID NO: 1911 - DNA, 16 bp, Artificial sequence
  Synthetic oligonucleotide
actcttaatgagtagt

SEQ ID NO: 1912 - DNA, 16 bp, Artificial sequence
  Synthetic oligonucleotide
aggaaggtgctatcta

SEQ ID NO: 1913 - DNA, 16 bp, Artificial sequence
  Synthetic oligonucleotide
taaggcaggtgccatc

SEQ ID NO: 1914 - DNA, 16 bp, Artificial sequence
  Synthetic oligonucleotide
tccaatcagagtctgt

SEQ ID NO: 1915 - DNA, 16 bp, Artificial sequence
  Synthetic oligonucleotide
tctaagattgggtcca

SEQ ID NO: 1916 - DNA, 16 bp, Artificial sequence
  Synthetic oligonucleotide
catctatgaacatggc

SEQ ID NO: 1917 - DNA, 16 bp, Artificial sequence
  Synthetic oligonucleotide
caaagggtaacatcca

SEQ ID NO: 1918 - DNA, 16 bp, Artificial sequence
  Synthetic oligonucleotide
gacgatttcatcccag

SEQ ID NO: 1919 - DNA, 16 bp, Artificial sequence
  Synthetic oligonucleotide
acacacctgaccagag

SEQ ID NO: 1920 - DNA, 16 bp, Artificial sequence
  Synthetic oligonucleotide
atcagaacacacctga

SEQ ID NO: 1921 - DNA, 16 bp, Artificial sequence
  Synthetic oligonucleotide
gagtatttgccctttc

SEQ ID NO: 1922 - DNA, 16 bp, Artificial sequence
  Synthetic oligonucleotide
acatggaaagggagtg

SEQ ID NO: 1923 - DNA, 16 bp, Artificial sequence
  Synthetic oligonucleotide
gataacttgcatgctt

SEQ ID NO: 1924 - DNA, 16 bp, Artificial sequence
  Synthetic oligonucleotide
catgaatcaaaaggct

SEQ ID NO: 1925 - DNA, 16 bp, Artificial sequence
  Synthetic oligonucleotide
ccagatgaagaagccc

SEQ ID NO: 1926 - DNA, 16 bp, Artificial sequence
  Synthetic oligonucleotide
ccaaggaagtatcaga

SEQ ID NO: 1927 - DNA, 16 bp, Artificial sequence
  Synthetic oligonucleotide
gcacatttgtaattgg

SEQ ID NO: 1928 - DNA, 16 bp, Artificial sequence
  Synthetic oligonucleotide
tgagaaggagctttca

SEQ ID NO: 1929 - DNA, 16 bp, Artificial sequence
  Synthetic oligonucleotide
catcttaatctcacac

SEQ ID NO: 1930 - DNA, 16 bp, Artificial sequence
  Synthetic oligonucleotide
atattatggttctagt

SEQ ID NO: 1931 - DNA, 16 bp, Artificial sequence
  Synthetic oligonucleotide
ctaacacataggctat

SEQ ID NO: 1932 - DNA, 16 bp, Artificial sequence
  Synthetic oligonucleotide
caagctaagatgtcac

SEQ ID NO: 1933 - DNA, 16 bp, Artificial sequence
  Synthetic oligonucleotide
ggatatcttgccatgt

SEQ ID NO: 1934 - DNA, 16 bp, Artificial sequence
  Synthetic oligonucleotide
tagtagaaattgcaac

SEQ ID NO: 1935 - DNA, 16 bp, Artificial sequence
  Synthetic oligonucleotide
taagtaagactaatag

SEQ ID NO: 1936 - DNA, 16 bp, Artificial sequence
  Synthetic oligonucleotide
gaagagcataagagct

SEQ ID NO: 1937 - DNA, 16 bp, Artificial sequence
  Synthetic oligonucleotide
gttaccccatactcct

SEQ ID NO: 1938 - DNA, 16 bp, Artificial sequence
  Synthetic oligonucleotide
tagtaacagtggtttg

SEQ ID NO: 1939 - DNA, 16 bp, Artificial sequence
  Synthetic oligonucleotide
catataatctggaggc

SEQ ID NO: 1940 - DNA, 16 bp, Artificial sequence
  Synthetic oligonucleotide
cattatgttggcacaa

SEQ ID NO: 1941 - DNA, 16 bp, Artificial sequence
  Synthetic oligonucleotide
tctaaagcagcttgtt

SEQ ID NO: 1942 - DNA, 16 bp, Artificial sequence
  Synthetic oligonucleotide
ggaagtagttagagtt

SEQ ID NO: 1943 - DNA, 16 bp, Artificial sequence
  Synthetic oligonucleotide
ataaagtttcccttgc

SEQ ID NO: 1944 - DNA, 16 bp, Artificial sequence
  Synthetic oligonucleotide
tctaaaggaccatctt

SEQ ID NO: 1945 - DNA, 16 bp, Artificial sequence
  Synthetic oligonucleotide
aagagttacactaagg

SEQ ID NO: 1946 - DNA, 16 bp, Artificial sequence
  Synthetic oligonucleotide
ttgacccatcagcaag

SEQ ID NO: 1947 - DNA, 16 bp, Artificial sequence
  Synthetic oligonucleotide
aggtttccctatggag

SEQ ID NO: 1948 - DNA, 16 bp, Artificial sequence
  Synthetic oligonucleotide
tagccaaatgcttacc

SEQ ID NO: 1949 - DNA, 16 bp, Artificial sequence
  Synthetic oligonucleotide
acactaagataccagg

SEQ ID NO: 1950 - DNA, 16 bp, Artificial sequence
  Synthetic oligonucleotide
tagtcctctaagtgca

SEQ ID NO: 1951 - DNA, 16 bp, Artificial sequence
  Synthetic oligonucleotide
tggctagatccacatg

SEQ ID NO: 1952 - DNA, 16 bp, Artificial sequence
  Synthetic oligonucleotide
tgatcgcagcgaagat

SEQ ID NO: 1953 - DNA, 16 bp, Artificial sequence
  Synthetic oligonucleotide
tctgaaccccacttcg

SEQ ID NO: 1954 - DNA, 16 bp, Artificial sequence
  Synthetic oligonucleotide
actccagtaaacccat

SEQ ID NO: 1955 - DNA, 16 bp, Artificial sequence
  Synthetic oligonucleotide
caatgcactggaatct

SEQ ID NO: 1956 - DNA, 16 bp, Artificial sequence
  Synthetic oligonucleotide
gtcttgccgatggcca

SEQ ID NO: 1957 - DNA, 16 bp, Artificial sequence
  Synthetic oligonucleotide
catgatcaggtccccc

SEQ ID NO: 1958 - DNA, 16 bp, Artificial sequence
  Synthetic oligonucleotide
cagtcagtgcagagcg

SEQ ID NO: 1959 - DNA, 16 bp, Artificial sequence
  Synthetic oligonucleotide
aatcagactgaaggct

SEQ ID NO: 1960 - DNA, 16 bp, Artificial sequence
  Synthetic oligonucleotide
acatccgccttctgca

SEQ ID NO: 1961 - DNA, 16 bp, Artificial sequence
  Synthetic oligonucleotide
ctcggctgggaagctt

SEQ ID NO: 1962 - DNA, 16 bp, Artificial sequence
  Synthetic oligonucleotide
aggtcctctcctggtt

SEQ ID NO: 1963 - DNA, 16 bp, Artificial sequence
  Synthetic oligonucleotide
gaacaattccagctgg

SEQ ID NO: 1964 - DNA, 16 bp, Artificial sequence
  Synthetic oligonucleotide
tgtggtccattctggt

SEQ ID NO: 1965 - DNA, 16 bp, Artificial sequence
  Synthetic oligonucleotide
caaggtgtcggccttc

SEQ ID NO: 1966 - DNA, 16 bp, Artificial sequence
  Synthetic oligonucleotide
agcatgagaggagctt

SEQ ID NO: 1967 - DNA, 16 bp, Artificial sequence
  Synthetic oligonucleotide
gagaattgtcactgag

SEQ ID NO: 1968 - DNA, 16 bp, Artificial sequence
  Synthetic oligonucleotide
aggaccaaggagatgt

SEQ ID NO: 1969 - DNA, 16 bp, Artificial sequence
  Synthetic oligonucleotide
gcaagatcctgacaac

SEQ ID NO: 1970 - DNA, 16 bp, Artificial sequence
  Synthetic oligonucleotide
cacatagagtctggtc

SEQ ID NO: 1971 - DNA, 16 bp, Artificial sequence
  Synthetic oligonucleotide
acactgtggattcttg

SEQ ID NO: 1972 - DNA, 16 bp, Artificial sequence
  Synthetic oligonucleotide
agctgaacaacagact

SEQ ID NO: 1973 - DNA, 16 bp, Artificial sequence
  Synthetic oligonucleotide
cgcaggtaaaggtgcg

SEQ ID NO: 1974 - DNA, 16 bp, Artificial sequence
  Synthetic oligonucleotide
agtagtttgatcccct

SEQ ID NO: 1975 - DNA, 16 bp, Artificial sequence
  Synthetic oligonucleotide
gctctggctggaggtc

SEQ ID NO: 1976 - DNA, 16 bp, Artificial sequence
  Synthetic oligonucleotide
ggctcaaagacgacgg

SEQ ID NO: 1977 - DNA, 16 bp, Artificial sequence
  Synthetic oligonucleotide
gcaagctctcttctcc

SEQ ID NO: 1978 - DNA, 16 bp, Artificial sequence
  Synthetic oligonucleotide
aagaggaacatcctct

SEQ ID NO: 1979 - DNA, 16 bp, Artificial sequence
  Synthetic oligonucleotide
gtcagttaatagaaag

SEQ ID NO: 1980 - DNA, 16 bp, Artificial sequence
  Synthetic oligonucleotide
aattttcaaccagcta

SEQ ID NO: 1981 - DNA, 16 bp, Artificial sequence
  Synthetic oligonucleotide
ttatcattcaatgggt

SEQ ID NO: 1982 - DNA, 16 bp, Artificial sequence
  Synthetic oligonucleotide
atctaaaacagtagag

SEQ ID NO: 1983 - DNA, 16 bp, Artificial sequence
  Synthetic oligonucleotide
tgattatgacactttc

SEQ ID NO: 1984 - DNA, 16 bp, Artificial sequence
  Synthetic oligonucleotide
agagttagtcactagg

SEQ ID NO: 1985 - DNA, 16 bp, Artificial sequence
  Synthetic oligonucleotide
cctaatatttggcatg

SEQ ID NO: 1986 - DNA, 16 bp, Artificial sequence
  Synthetic oligonucleotide
taagatacacagctga

SEQ ID NO: 1987 - DNA, 16 bp, Artificial sequence
  Synthetic oligonucleotide
ctccaagtagcttaca

SEQ ID NO: 1988 - DNA, 16 bp, Artificial sequence
  Synthetic oligonucleotide
tcataaggtctccctg

SEQ ID NO: 1989 - DNA, 16 bp, Artificial sequence
  Synthetic oligonucleotide
aaggaaggtgctatct

SEQ ID NO: 1990 - DNA, 16 bp, Artificial sequence
  Synthetic oligonucleotide
gtaaggcaggtgccat

SEQ ID NO: 1991 - DNA, 16 bp, Artificial sequence
  Synthetic oligonucleotide
ctccaatcagagtctg

SEQ ID NO: 1992 - DNA, 16 bp, Artificial sequence
  Synthetic oligonucleotide
tgcaaagtctagctct

SEQ ID NO: 1993 - DNA, 16 bp, Artificial sequence
  Synthetic oligonucleotide
ggcaaattctccaact

SEQ ID NO: 1994 - DNA, 16 bp, Artificial sequence
  Synthetic oligonucleotide
atctttgaagccacac

SEQ ID NO: 1995 - DNA, 16 bp, Artificial sequence
  Synthetic oligonucleotide
caacattgtcacccca

SEQ ID NO: 1996 - DNA, 16 bp, Artificial sequence
  Synthetic oligonucleotide
gacacacctgaccaga

SEQ ID NO: 1997 - DNA, 16 bp, Artificial sequence
  Synthetic oligonucleotide
catcagaacacacctg

SEQ ID NO: 1998 - DNA, 16 bp, Artificial sequence
  Synthetic oligonucleotide
acaatcagagtatttg

SEQ ID NO: 1999 - DNA, 16 bp, Artificial sequence
  Synthetic oligonucleotide
acaaggaagcacccgt

SEQ ID NO: 2000 - DNA, 16 bp, Artificial sequence
  Synthetic oligonucleotide
cgataacttgcatgct

SEQ ID NO: 2001 - DNA, 16 bp, Artificial sequence
  Synthetic oligonucleotide
acatgaatcaaaaggc

SEQ ID NO: 2002 - DNA, 16 bp, Artificial sequence
  Synthetic oligonucleotide
ccttaagctgagagcc

SEQ ID NO: 2003 - DNA, 16 bp, Artificial sequence
  Synthetic oligonucleotide
tccaaggaagtatcag

SEQ ID NO: 2004 - DNA, 16 bp, Artificial sequence
  Synthetic oligonucleotide
tattacagatgcatca

SEQ ID NO: 2005 - DNA, 16 bp, Artificial sequence
  Synthetic oligonucleotide
taaatggctctctcag

SEQ ID NO: 2006 - DNA, 16 bp, Artificial sequence
  Synthetic oligonucleotide
catgaacagattcccc

SEQ ID NO: 2007 - DNA, 16 bp, Artificial sequence
  Synthetic oligonucleotide
tatattatggttctag

SEQ ID NO: 2008 - DNA, 16 bp, Artificial sequence
  Synthetic oligonucleotide
cctaacacataggcta

SEQ ID NO: 2009 - DNA, 16 bp, Artificial sequence
  Synthetic oligonucleotide
caaggtatggcaggag

SEQ ID NO: 2010 - DNA, 16 bp, Artificial sequence
  Synthetic oligonucleotide
cggatatcttgccatg

SEQ ID NO: 2011 - DNA, 16 bp, Artificial sequence
  Synthetic oligonucleotide
agtagtagaaattgca

SEQ ID NO: 2012 - DNA, 16 bp, Artificial sequence
  Synthetic oligonucleotide
gtaagtaagactaata

SEQ ID NO: 2013 - DNA, 16 bp, Artificial sequence
  Synthetic oligonucleotide
caaattaagcccattc

SEQ ID NO: 2014 - DNA, 16 bp, Artificial sequence
  Synthetic oligonucleotide
tcagatatgatctggg

SEQ ID NO: 2015 - DNA, 16 bp, Artificial sequence
  Synthetic oligonucleotide
ttagtaacagtggttt

SEQ ID NO: 2016 - DNA, 16 bp, Artificial sequence
  Synthetic oligonucleotide
acatataatctggagg

SEQ ID NO: 2017 - DNA, 16 bp, Artificial sequence
  Synthetic oligonucleotide
ccattatgttggcaca

SEQ ID NO: 2018 - DNA, 16 bp, Artificial sequence
  Synthetic oligonucleotide
gtctaaagcagcttgt

SEQ ID NO: 2019 - DNA, 16 bp, Artificial sequence
  Synthetic oligonucleotide
gggaagtagttagagt

SEQ ID NO: 2020 - DNA, 16 bp, Artificial sequence
  Synthetic oligonucleotide
cgatgtaagttcttcc

SEQ ID NO: 2021 - DNA, 16 bp, Artificial sequence
  Synthetic oligonucleotide
gttgctatggacatag

SEQ ID NO: 2022 - DNA, 16 bp, Artificial sequence
  Synthetic oligonucleotide
agaagacacctcactt

SEQ ID NO: 2023 - DNA, 16 bp, Artificial sequence
  Synthetic oligonucleotide
catcttgacccatcag

SEQ ID NO: 2024 - DNA, 16 bp, Artificial sequence
  Synthetic oligonucleotide
aaggtttccctatgga

SEQ ID NO: 2025 - DNA, 16 bp, Artificial sequence
  Synthetic oligonucleotide
ttagccaaatgcttac

SEQ ID NO: 2026 - DNA, 16 bp, Artificial sequence
  Synthetic oligonucleotide
cacactaagataccag

SEQ ID NO: 2027 - DNA, 16 bp, Artificial sequence
  Synthetic oligonucleotide
atagtcctctaagtgc

SEQ ID NO: 2028 - DNA, 16 bp, Artificial sequence
  Synthetic oligonucleotide
gtggctagatccacat

SEQ ID NO: 2029 - DNA, 16 bp, Artificial sequence
  Synthetic oligonucleotide
ttgatcgcagcgaaga

SEQ ID NO: 2030 - DNA, 16 bp, Artificial sequence
  Synthetic oligonucleotide
ttatctgaaccccact

SEQ ID NO: 2031 - DNA, 16 bp, Artificial sequence
  Synthetic oligonucleotide
gtactccagtaaaccc

SEQ ID NO: 2032 - DNA, 16 bp, Artificial sequence
  Synthetic oligonucleotide
tcaatgcactggaatc

SEQ ID NO: 2033 - DNA, 16 bp, Artificial sequence
  Synthetic oligonucleotide
tggtcttgccgatggc

SEQ ID NO: 2034 - DNA, 16 bp, Artificial sequence
  Synthetic oligonucleotide
tcatgatcaggtcccc

SEQ ID NO: 2035 - DNA, 16 bp, Artificial sequence
  Synthetic oligonucleotide
ccttctgccagtcagt

SEQ ID NO: 2036 - DNA, 16 bp, Artificial sequence
  Synthetic oligonucleotide
gaatcagactgaaggc

SEQ ID NO: 2037 - DNA, 16 bp, Artificial sequence
  Synthetic oligonucleotide
acacatccgccttctg

SEQ ID NO: 2038 - DNA, 16 bp, Artificial sequence
  Synthetic oligonucleotide
tccagaaggactgtca

SEQ ID NO: 2039 - DNA, 16 bp, Artificial sequence
  Synthetic oligonucleotide
gaggtcctctcctggt

SEQ ID NO: 2040 - DNA, 16 bp, Artificial sequence
  Synthetic oligonucleotide
gtagaacaattccagc

SEQ ID NO: 2041 - DNA, 16 bp, Artificial sequence
  Synthetic oligonucleotide
gatgacagttctcaat

SEQ ID NO: 2042 - DNA, 16 bp, Artificial sequence
  Synthetic oligonucleotide
tcaaggtgtcggcctt

SEQ ID NO: 2043 - DNA, 16 bp, Artificial sequence
  Synthetic oligonucleotide
gcagcatgagaggagc

SEQ ID NO: 2044 - DNA, 16 bp, Artificial sequence
  Synthetic oligonucleotide
tcccccagagaattgt

SEQ ID NO: 2045 - DNA, 16 bp, Artificial sequence
  Synthetic oligonucleotide
tctgattccgaagtca

SEQ ID NO: 2046 - DNA, 16 bp, Artificial sequence
  Synthetic oligonucleotide
tgcaagatcctgacaa

SEQ ID NO: 2047 - DNA, 16 bp, Artificial sequence
  Synthetic oligonucleotide
cccacatagagtctgg

SEQ ID NO: 2048 - DNA, 16 bp, Artificial sequence
  Synthetic oligonucleotide
tacactgtggattctt

SEQ ID NO: 2049 - DNA, 16 bp, Artificial sequence
  Synthetic oligonucleotide
aagctgaacaacagac

SEQ ID NO: 2050 - DNA, 16 bp, Artificial sequence
  Synthetic oligonucleotide
ctcgcaggtaaaggtg

SEQ ID NO: 2051 - DNA, 16 bp, Artificial sequence
  Synthetic oligonucleotide
gagtagtttgatcccc

SEQ ID NO: 2052 - DNA, 16 bp, Artificial sequence
  Synthetic oligonucleotide
ctcagctttcgcaggc

SEQ ID NO: 2053 - DNA, 16 bp, Artificial sequence
  Synthetic oligonucleotide
gaaggctcaaagacga

SEQ ID NO: 2054 - DNA, 16 bp, Artificial sequence
  Synthetic oligonucleotide
ggcaagctctcttctc

SEQ ID NO: 2055 - DNA, 16 bp, Artificial sequence
  Synthetic oligonucleotide
accaagaggaacatcc

SEQ ID NO: 2056 - DNA, 16 bp, Artificial sequence
  Synthetic oligonucleotide
atggtcagttaataga

SEQ ID NO: 2057 - DNA, 16 bp, Artificial sequence
  Synthetic oligonucleotide
gaattttcaaccagct

SEQ ID NO: 2058 - DNA, 16 bp, Artificial sequence
  Synthetic oligonucleotide
ggagttatcattcaat

SEQ ID NO: 2059 - DNA, 16 bp, Artificial sequence
  Synthetic oligonucleotide
gtatctaaaacagtag

SEQ ID NO: 2060 - DNA, 16 bp, Artificial sequence
  Synthetic oligonucleotide
caaagtacttctacag

SEQ ID NO: 2061 - DNA, 16 bp, Artificial sequence
  Synthetic oligonucleotide
caagagttagtcacta

SEQ ID NO: 2062 - DNA, 16 bp, Artificial sequence
  Synthetic oligonucleotide
gcaattgaaacctggc

SEQ ID NO: 2063 - DNA, 16 bp, Artificial sequence
  Synthetic oligonucleotide
cggaatggagaaatgg

SEQ ID NO: 2064 - DNA, 16 bp, Artificial sequence
  Synthetic oligonucleotide
actcttaggcactagt

SEQ ID NO: 2065 - DNA, 16 bp, Artificial sequence
  Synthetic oligonucleotide
cttcataaggtctccc

SEQ ID NO: 2066 - DNA, 16 bp, Artificial sequence
  Synthetic oligonucleotide
gaaggaaggtgctatc

SEQ ID NO: 2067 - DNA, 16 bp, Artificial sequence
  Synthetic oligonucleotide
agtaaggcaggtgcca

SEQ ID NO: 2068 - DNA, 16 bp, Artificial sequence
  Synthetic oligonucleotide
gctccaatcagagtct

SEQ ID NO: 2069 - DNA, 16 bp, Artificial sequence
  Synthetic oligonucleotide
ctccaacatgcagtca

SEQ ID NO: 2070 - DNA, 16 bp, Artificial sequence
  Synthetic oligonucleotide
gtttttaggtgaggtt

SEQ ID NO: 2071 - DNA, 16 bp, Artificial sequence
  Synthetic oligonucleotide
gcaaagatgaagagtg

SEQ ID NO: 2072 - DNA, 16 bp, Artificial sequence
  Synthetic oligonucleotide
gtaagtgaagcgggcg

SEQ ID NO: 2073 - DNA, 16 bp, Artificial sequence
  Synthetic oligonucleotide
ggacacacctgaccag

SEQ ID NO: 2074 - DNA, 16 bp, Artificial sequence
  Synthetic oligonucleotide
gcatcagaacacacct

SEQ ID NO: 2075 - DNA, 16 bp, Artificial sequence
  Synthetic oligonucleotide
ctataaggacaatcag

SEQ ID NO: 2076 - DNA, 16 bp, Artificial sequence
  Synthetic oligonucleotide
gacaaggaagcacccg

SEQ ID NO: 2077 - DNA, 16 bp, Artificial sequence
  Synthetic oligonucleotide
gcgataacttgcatgc

SEQ ID NO: 2078 - DNA, 16 bp, Artificial sequence
  Synthetic oligonucleotide
tgattattagtgggta

SEQ ID NO: 2079 - DNA, 16 bp, Artificial sequence
  Synthetic oligonucleotide
taaattggaggtccca

SEQ ID NO: 2080 - DNA, 16 bp, Artificial sequence
  Synthetic oligonucleotide
gatatggtcacatctg

SEQ ID NO: 2081 - DNA, 16 bp, Artificial sequence
  Synthetic oligonucleotide
atattacagatgcatc

SEQ ID NO: 2082 - DNA, 16 bp, Artificial sequence
  Synthetic oligonucleotide
gtaaatggctctctca

SEQ ID NO: 2083 - DNA, 16 bp, Artificial sequence
  Synthetic oligonucleotide
caagatgacattccac

SEQ ID NO: 2084 - DNA, 16 bp, Artificial sequence
  Synthetic oligonucleotide
ggaaatttatccatga

SEQ ID NO: 2085 - DNA, 16 bp, Artificial sequence
  Synthetic oligonucleotide
acctaacacataggct

SEQ ID NO: 2086 - DNA, 16 bp, Artificial sequence
  Synthetic oligonucleotide
tgcaaggtatggcagg

SEQ ID NO: 2087 - DNA, 16 bp, Artificial sequence
  Synthetic oligonucleotide
caagcacggatatctt

SEQ ID NO: 2088 - DNA, 16 bp, Artificial sequence
  Synthetic oligonucleotide
tagtagtagaaattgc

SEQ ID NO: 2089 - DNA, 16 bp, Artificial sequence
  Synthetic oligonucleotide
acagtaagtaagacta

SEQ ID NO: 2090 - DNA, 16 bp, Artificial sequence
  Synthetic oligonucleotide
tactattcttgagtca

SEQ ID NO: 2091 - DNA, 16 bp, Artificial sequence
  Synthetic oligonucleotide
ctcagatatgatctgg

SEQ ID NO: 2092 - DNA, 16 bp, Artificial sequence
  Synthetic oligonucleotide
aactagcttcaagcag

SEQ ID NO: 2093 - DNA, 16 bp, Artificial sequence
  Synthetic oligonucleotide
gacatataatctggag

SEQ ID NO: 2094 - DNA, 16 bp, Artificial sequence
  Synthetic oligonucleotide
tccattatgttggcac

SEQ ID NO: 2095 - DNA, 16 bp, Artificial sequence
  Synthetic oligonucleotide
agtctaaagcagcttg

SEQ ID NO: 2096 - DNA, 16 bp, Artificial sequence
  Synthetic oligonucleotide
tgggaagtagttagag

SEQ ID NO: 2097 - DNA, 16 bp, Artificial sequence
  Synthetic oligonucleotide
tcgatgtaagttcttc

SEQ ID NO: 2098 - DNA, 16 bp, Artificial sequence
  Synthetic oligonucleotide
gggactgcaagagcca

SEQ ID NO: 2099 - DNA, 16 bp, Artificial sequence
  Synthetic oligonucleotide
actgaacgataaaccc

SEQ ID NO: 2100 - DNA, 16 bp, Artificial sequence
  Synthetic oligonucleotide
gatgccatcttgaccc

SEQ ID NO: 2101 - DNA, 16 bp, Artificial sequence
  Synthetic oligonucleotide
gtgtgtcctgagccat

SEQ ID NO: 2102 - DNA, 16 bp, Artificial sequence
  Synthetic oligonucleotide
ttagccaaggccgggc

SEQ ID NO: 2103 - DNA, 16 bp, Artificial sequence
  Synthetic oligonucleotide
cggtccacactaagat

SEQ ID NO: 2104 - DNA, 16 bp, Artificial sequence
  Synthetic oligonucleotide
ggatagtcctctaagt

SEQ ID NO: 2105 - DNA, 16 bp, Artificial sequence
  Synthetic oligonucleotide
gaagtcgatcattagc

SEQ ID NO: 2106 - DNA, 16 bp, Artificial sequence
  Synthetic oligonucleotide
tgttgatcgcagcgaa

SEQ ID NO: 2107 - DNA, 16 bp, Artificial sequence
  Synthetic oligonucleotide
cattatctgaacccca

SEQ ID NO: 2108 - DNA, 16 bp, Artificial sequence
  Synthetic oligonucleotide
agagattctcgaaagg

SEQ ID NO: 2109 - DNA, 16 bp, Artificial sequence
  Synthetic oligonucleotide
cttcaatgcactggaa

SEQ ID NO: 2110 - DNA, 16 bp, Artificial sequence
  Synthetic oligonucleotide
aactccatcttaatgg

SEQ ID NO: 2111 - DNA, 16 bp, Artificial sequence
  Synthetic oligonucleotide
gctcatgatcaggtcc

SEQ ID NO: 2112 - DNA, 16 bp, Artificial sequence
  Synthetic oligonucleotide
gagaatgtctccccgc

SEQ ID NO: 2113 - DNA, 16 bp, Artificial sequence
  Synthetic oligonucleotide
cctgaatcagactgaa

SEQ ID NO: 2114 - DNA, 16 bp, Artificial sequence
  Synthetic oligonucleotide
gcagacacatccgcct

SEQ ID NO: 2115 - DNA, 16 bp, Artificial sequence
  Synthetic oligonucleotide
tcgaatttgccatagt

SEQ ID NO: 2116 - DNA, 16 bp, Artificial sequence
  Synthetic oligonucleotide
taggaggtcctctcct

SEQ ID NO: 2117 - DNA, 16 bp, Artificial sequence
  Synthetic oligonucleotide
cagtagaacaattcca

SEQ ID NO: 2118 - DNA, 16 bp, Artificial sequence
  Synthetic oligonucleotide
ccgatgacagttctca

SEQ ID NO: 2119 - DNA, 16 bp, Artificial sequence
  Synthetic oligonucleotide
tatcaaggtgtcggcc

SEQ ID NO: 2120 - DNA, 16 bp, Artificial sequence
  Synthetic oligonucleotide
ccaatccatgagaaca

SEQ ID NO: 2121 - DNA, 16 bp, Artificial sequence
  Synthetic oligonucleotide
acaacactctcatccc

SEQ ID NO: 2122 - DNA, 16 bp, Artificial sequence
  Synthetic oligonucleotide
caacaggtgcttcagt

SEQ ID NO: 2123 - DNA, 16 bp, Artificial sequence
  Synthetic oligonucleotide
gatgcaagatcctgac

SEQ ID NO: 2124 - DNA, 16 bp, Artificial sequence
  Synthetic oligonucleotide
tctcccccacatagag

SEQ ID NO: 2125 - DNA, 16 bp, Artificial sequence
  Synthetic oligonucleotide
gttacactgtggattc

SEQ ID NO: 2126 - DNA, 16 bp, Artificial sequence
  Synthetic oligonucleotide
cgaggacaaagctgaa

SEQ ID NO: 2127 - DNA, 16 bp, Artificial sequence
  Synthetic oligonucleotide
gttgcctcgcaggtaa

SEQ ID NO: 2128 - DNA, 16 bp, Artificial sequence
  Synthetic oligonucleotide
caagagtccctcacag

SEQ ID NO: 2129 - DNA, 16 bp, Artificial sequence
  Synthetic oligonucleotide
caggctcagctttcgc

SEQ ID NO: 2130 - DNA, 16 bp, Artificial sequence
  Synthetic oligonucleotide
taccaagaaggctcaa

SEQ ID NO: 2131 - DNA, 16 bp, Artificial sequence
  Synthetic oligonucleotide
tcggcaagctctcttc

SEQ ID NO: 2132 - DNA, 16 bp, Artificial sequence
  Synthetic oligonucleotide
tcaccaagaggaacat

SEQ ID NO: 2133 - DNA, 16 bp, Artificial sequence
  Synthetic oligonucleotide
tgttatggtcagttaa

SEQ ID NO: 2134 - DNA, 16 bp, Artificial sequence
  Synthetic oligonucleotide
tcctgaattttcaacc

SEQ ID NO: 2135 - DNA, 16 bp, Artificial sequence
  Synthetic oligonucleotide
ccagagtagtaagatt

SEQ ID NO: 2136 - DNA, 16 bp, Artificial sequence
  Synthetic oligonucleotide
gttcttaggatatgga

SEQ ID NO: 2137 - DNA, 16 bp, Artificial sequence
  Synthetic oligonucleotide
tagcaaagtacttcta

SEQ ID NO: 2138 - DNA, 16 bp, Artificial sequence
  Synthetic oligonucleotide
agaaattcaggttagg

SEQ ID NO: 2139 - DNA, 16 bp, Artificial sequence
  Synthetic oligonucleotide
actattatcacagagg

SEQ ID NO: 2140 - DNA, 16 bp, Artificial sequence
  Synthetic oligonucleotide
ctggaagccgagtttc

SEQ ID NO: 2141 - DNA, 16 bp, Artificial sequence
  Synthetic oligonucleotide
taagaaacatcccccc

SEQ ID NO: 2142 - DNA, 16 bp, Artificial sequence
  Synthetic oligonucleotide
tgagcctcctaccggg

SEQ ID NO: 2143 - DNA, 16 bp, Artificial sequence
  Synthetic oligonucleotide
taccagggctccagtc

SEQ ID NO: 2144 - DNA, 16 bp, Artificial sequence
  Synthetic oligonucleotide
agagtaaggcaggtgc

SEQ ID NO: 2145 - DNA, 16 bp, Artificial sequence
  Synthetic oligonucleotide
gggctccaatcagagt

SEQ ID NO: 2146 - DNA, 16 bp, Artificial sequence
  Synthetic oligonucleotide
agaaaatcgcaagccc

SEQ ID NO: 2147 - DNA, 16 bp, Artificial sequence
  Synthetic oligonucleotide
tcatagtttttaggtg

SEQ ID NO: 2148 - DNA, 16 bp, Artificial sequence
  Synthetic oligonucleotide
gttaaatgtcccaaac

SEQ ID NO: 2149 - DNA, 16 bp, Artificial sequence
  Synthetic oligonucleotide
cgtaaacagtgccggg

SEQ ID NO: 2150 - DNA, 16 bp, Artificial sequence
  Synthetic oligonucleotide
caggacacacctgacc

SEQ ID NO: 2151 - DNA, 16 bp, Artificial sequence
  Synthetic oligonucleotide
gatcagagagctccgg

SEQ ID NO: 2152 - DNA, 16 bp, Artificial sequence
  Synthetic oligonucleotide
ctcctataaggacaat

SEQ ID NO: 2153 - DNA, 16 bp, Artificial sequence
  Synthetic oligonucleotide
ctggtaagacacccat

SEQ ID NO: 2154 - DNA, 16 bp, Artificial sequence
  Synthetic oligonucleotide
gcactatgcgataact

SEQ ID NO: 2155 - DNA, 16 bp, Artificial sequence
  Synthetic oligonucleotide
gaaagtggtacaggga

SEQ ID NO: 2156 - DNA, 16 bp, Artificial sequence
  Synthetic oligonucleotide
gcaaagctaaattgga

SEQ ID NO: 2157 - DNA, 16 bp, Artificial sequence
  Synthetic oligonucleotide
cttcatagaaagagat

SEQ ID NO: 2158 - DNA, 16 bp, Artificial sequence
  Synthetic oligonucleotide
tagtaactacatagag

SEQ ID NO: 2159 - DNA, 16 bp, Artificial sequence
  Synthetic oligonucleotide
ctattgtaaatggctc

SEQ ID NO: 2160 - DNA, 16 bp, Artificial sequence
  Synthetic oligonucleotide
agcaagatgacattcc

SEQ ID NO: 2161 - DNA, 16 bp, Artificial sequence
  Synthetic oligonucleotide
cacaaatcagcatgga

SEQ ID NO: 2162 - DNA, 16 bp, Artificial sequence
  Synthetic oligonucleotide
gctatacctaacacat

SEQ ID NO: 2163 - DNA, 16 bp, Artificial sequence
  Synthetic oligonucleotide
atccaatatgactcaa

SEQ ID NO: 2164 - DNA, 16 bp, Artificial sequence
  Synthetic oligonucleotide
tttaccaagcacggat

SEQ ID NO: 2165 - DNA, 16 bp, Artificial sequence
  Synthetic oligonucleotide
acacagtagtagtaga

SEQ ID NO: 2166 - DNA, 16 bp, Artificial sequence
  Synthetic oligonucleotide
cccaattaaggaagag

SEQ ID NO: 2167 - DNA, 16 bp, Artificial sequence
  Synthetic oligonucleotide
taagagttttgatgta

SEQ ID NO: 2168 - DNA, 16 bp, Artificial sequence
  Synthetic oligonucleotide
agattatcttgtggcc

SEQ ID NO: 2169 - DNA, 16 bp, Artificial sequence
  Synthetic oligonucleotide
atcttagcctgtcttg

SEQ ID NO: 2170 - DNA, 16 bp, Artificial sequence
  Synthetic oligonucleotide
gaagaatcaggtttcg

SEQ ID NO: 2171 - DNA, 16 bp, Artificial sequence
  Synthetic oligonucleotide
atattggcttgtcctg

SEQ ID NO: 2172 - DNA, 16 bp, Artificial sequence
  Synthetic oligonucleotide
ccagtattgtgagata

SEQ ID NO: 2173 - DNA, 16 bp, Artificial sequence
  Synthetic oligonucleotide
ttaaaggtgaggccct

SEQ ID NO: 2174 - DNA, 16 bp, Artificial sequence
  Synthetic oligonucleotide
caattctacacattgc

SEQ ID NO: 2175 - DNA, 16 bp, Artificial sequence
  Synthetic oligonucleotide
gcactgaacgataaac

SEQ ID NO: 2176 - DNA, 16 bp, Artificial sequence
  Synthetic oligonucleotide
atcccagtggttatcc

SEQ ID NO: 2177 - DNA, 16 bp, Artificial sequence
  Synthetic oligonucleotide
cgatgccatcttgacc

SEQ ID NO: 2178 - DNA, 16 bp, Artificial sequence
  Synthetic oligonucleotide
agtgtgtcctgagcca

SEQ ID NO: 2179 - DNA, 16 bp, Artificial sequence
  Synthetic oligonucleotide
gttagccaaggccggg

SEQ ID NO: 2180 - DNA, 16 bp, Artificial sequence
  Synthetic oligonucleotide
ttcggtccacactaag

SEQ ID NO: 2181 - DNA, 16 bp, Artificial sequence
  Synthetic oligonucleotide
aggatagtcctctaag

SEQ ID NO: 2182 - DNA, 16 bp, Artificial sequence
  Synthetic oligonucleotide
tgaagtcgatcattag

SEQ ID NO: 2183 - DNA, 16 bp, Artificial sequence
  Synthetic oligonucleotide
ctgttgatcgcagcga

SEQ ID NO: 2184 - DNA, 16 bp, Artificial sequence
  Synthetic oligonucleotide
gcattatctgaacccc

SEQ ID NO: 2185 - DNA, 16 bp, Artificial sequence
  Synthetic oligonucleotide
caaatagagattctcg

SEQ ID NO: 2186 - DNA, 16 bp, Artificial sequence
  Synthetic oligonucleotide
tcttcaatgcactgga

SEQ ID NO: 2187 - DNA, 16 bp, Artificial sequence
  Synthetic oligonucleotide
gtcaaacagcaactcc

SEQ ID NO: 2188 - DNA, 16 bp, Artificial sequence
  Synthetic oligonucleotide
tcttgtggatgggtgg

SEQ ID NO: 2189 - DNA, 16 bp, Artificial sequence
  Synthetic oligonucleotide
ggagaatgtctccccg

SEQ ID NO: 2190 - DNA, 16 bp, Artificial sequence
  Synthetic oligonucleotide
tcctgaatcagactga

SEQ ID NO: 2191 - DNA, 16 bp, Artificial sequence
  Synthetic oligonucleotide
aagcagacacatccgc

SEQ ID NO: 2192 - DNA, 16 bp, Artificial sequence
  Synthetic oligonucleotide
ttttcgaatttgccat

SEQ ID NO: 2193 - DNA, 16 bp, Artificial sequence
  Synthetic oligonucleotide
gtaggaggtcctctcc

SEQ ID NO: 2194 - DNA, 16 bp, Artificial sequence
  Synthetic oligonucleotide
gtacaaacagtagaac

SEQ ID NO: 2195 - DNA, 16 bp, Artificial sequence
  Synthetic oligonucleotide
acccgatgacagttct

SEQ ID NO: 2196 - DNA, 16 bp, Artificial sequence
  Synthetic oligonucleotide
catatcaaggtgtcgg

SEQ ID NO: 2197 - DNA, 16 bp, Artificial sequence
  Synthetic oligonucleotide
accaatccatgagaac

SEQ ID NO: 2198 - DNA, 16 bp, Artificial sequence
  Synthetic oligonucleotide
tcacacaacactctca

SEQ ID NO: 2199 - DNA, 16 bp, Artificial sequence
  Synthetic oligonucleotide
gcacaacaggtgcttc

SEQ ID NO: 2200 - DNA, 16 bp, Artificial sequence
  Synthetic oligonucleotide
tgatgcaagatcctga

SEQ ID NO: 2201 - DNA, 16 bp, Artificial sequence
  Synthetic oligonucleotide
attctcccccacatag

SEQ ID NO: 2202 - DNA, 16 bp, Artificial sequence
  Synthetic oligonucleotide
ggttacactgtggatt

SEQ ID NO: 2203 - DNA, 16 bp, Artificial sequence
  Synthetic oligonucleotide
ccgaggacaaagctga

SEQ ID NO: 2204 - DNA, 16 bp, Artificial sequence
  Synthetic oligonucleotide
tgttgcctcgcaggta

SEQ ID NO: 2205 - DNA, 16 bp, Artificial sequence
  Synthetic oligonucleotide
gtgcaagagtccctca

SEQ ID NO: 2206 - DNA, 16 bp, Artificial sequence
  Synthetic oligonucleotide
ccaggctcagctttcg

SEQ ID NO: 2207 - DNA, 16 bp, Artificial sequence
  Synthetic oligonucleotide
ctaccaagaaggctca

SEQ ID NO: 2208 - DNA, 16 bp, Artificial sequence
  Synthetic oligonucleotide
gcacaggaaggcatcg

SEQ ID NO: 2209 - DNA, 16 bp, Artificial sequence
  Synthetic oligonucleotide
catgaggtcaccaaga

SEQ ID NO: 2210 - DNA, 16 bp, Artificial sequence
  Synthetic oligonucleotide
gtgttatggtcagtta

SEQ ID NO: 2211 - DNA, 16 bp, Artificial sequence
  Synthetic oligonucleotide
aacccatgagaacagg

SEQ ID NO: 2212 - DNA, 16 bp, Artificial sequence
  Synthetic oligonucleotide
aactactcataaagga

SEQ ID NO: 2213 - DNA, 16 bp, Artificial sequence
  Synthetic oligonucleotide
atcattagggaaacgg

SEQ ID NO: 2214 - DNA, 16 bp, Artificial sequence
  Synthetic oligonucleotide
cttagcaaagtacttc

SEQ ID NO: 2215 - DNA, 16 bp, Artificial sequence
  Synthetic oligonucleotide
gagaaattcaggttag

SEQ ID NO: 2216 - DNA, 16 bp, Artificial sequence
  Synthetic oligonucleotide
aactattatcacagag

SEQ ID NO: 2217 - DNA, 16 bp, Artificial sequence
  Synthetic oligonucleotide
gaagaagctggcgagg

SEQ ID NO: 2218 - DNA, 16 bp, Artificial sequence
  Synthetic oligonucleotide
ctaagaaacatccccc

SEQ ID NO: 2219 - DNA, 16 bp, Artificial sequence
  Synthetic oligonucleotide
ctgagcctcctaccgg

SEQ ID NO: 2220 - DNA, 16 bp, Artificial sequence
  Synthetic oligonucleotide
ctaccagggctccagt

SEQ ID NO: 2221 - DNA, 16 bp, Artificial sequence
  Synthetic oligonucleotide
tcagagtaaggcaggt

SEQ ID NO: 2222 - DNA, 16 bp, Artificial sequence
  Synthetic oligonucleotide
agggctccaatcagag

SEQ ID NO: 2223 - DNA, 16 bp, Artificial sequence
  Synthetic oligonucleotide
catatgaacttgcact

SEQ ID NO: 2224 - DNA, 16 bp, Artificial sequence
  Synthetic oligonucleotide
ccatacaaagcattct

SEQ ID NO: 2225 - DNA, 16 bp, Artificial sequence
  Synthetic oligonucleotide
ataaggttaaatgtcc

SEQ ID NO: 2226 - DNA, 16 bp, Artificial sequence
  Synthetic oligonucleotide
acattgggaggtcagc

SEQ ID NO: 2227 - DNA, 16 bp, Artificial sequence
  Synthetic oligonucleotide
tcaggacacacctgac

SEQ ID NO: 2228 - DNA, 16 bp, Artificial sequence
  Synthetic oligonucleotide
aagcaatgcattacac

SEQ ID NO: 2229 - DNA, 16 bp, Artificial sequence
  Synthetic oligonucleotide
ttctagacacctccta

SEQ ID NO: 2230 - DNA, 16 bp, Artificial sequence
  Synthetic oligonucleotide
caaagtaacccccatc

SEQ ID NO: 2231 - DNA, 16 bp, Artificial sequence
  Synthetic oligonucleotide
tgtaagagtcctctcc

SEQ ID NO: 2232 - DNA, 16 bp, Artificial sequence
  Synthetic oligonucleotide
tacaggaaagtggtac

SEQ ID NO: 2233 - DNA, 16 bp, Artificial sequence
  Synthetic oligonucleotide
agcaaagctaaattgg

SEQ ID NO: 2234 - DNA, 16 bp, Artificial sequence
  Synthetic oligonucleotide
gcgaggaaatgaaggc

SEQ ID NO: 2235 - DNA, 16 bp, Artificial sequence
  Synthetic oligonucleotide
gacaatagtaactaca

SEQ ID NO: 2236 - DNA, 16 bp, Artificial sequence
  Synthetic oligonucleotide
gactattgtaaatggc

SEQ ID NO: 2237 - DNA, 16 bp, Artificial sequence
  Synthetic oligonucleotide
cagcaagatgacattc

SEQ ID NO: 2238 - DNA, 16 bp, Artificial sequence
  Synthetic oligonucleotide
ctacacaaatcagcat

SEQ ID NO: 2239 - DNA, 16 bp, Artificial sequence
  Synthetic oligonucleotide
agctatacctaacaca

SEQ ID NO: 2240 - DNA, 16 bp, Artificial sequence
  Synthetic oligonucleotide
tcatagcaagtcccca

SEQ ID NO: 2241 - DNA, 16 bp, Artificial sequence
  Synthetic oligonucleotide
catttaccaagcacgg

SEQ ID NO: 2242 - DNA, 16 bp, Artificial sequence
  Synthetic oligonucleotide
gtagaatggattattc

SEQ ID NO: 2243 - DNA, 16 bp, Artificial sequence
  Synthetic oligonucleotide
gattatccatccactg

SEQ ID NO: 2244 - DNA, 16 bp, Artificial sequence
  Synthetic oligonucleotide
atcaatctcgatggaa

SEQ ID NO: 2245 - DNA, 16 bp, Artificial sequence
  Synthetic oligonucleotide
cagattatcttgtggc

SEQ ID NO: 2246 - DNA, 16 bp, Artificial sequence
  Synthetic oligonucleotide
gattttagcatcttag

SEQ ID NO: 2247 - DNA, 16 bp, Artificial sequence
  Synthetic oligonucleotide
gaaatgttttggcccg

SEQ ID NO: 2248 - DNA, 16 bp, Artificial sequence
  Synthetic oligonucleotide
aatattggcttgtcct

SEQ ID NO: 2249 - DNA, 16 bp, Artificial sequence
  Synthetic oligonucleotide
accaaattcatcagag

SEQ ID NO: 2250 - DNA, 16 bp, Artificial sequence
  Synthetic oligonucleotide
cttaaaggtgaggccc

SEQ ID NO: 2251 - DNA, 16 bp, Artificial sequence
  Synthetic oligonucleotide
gatcaattctacacat

SEQ ID NO: 2252 - DNA, 16 bp, Artificial sequence
  Synthetic oligonucleotide
caaagctaaattggag

SEQ ID NO: 2253 - DNA, 16 bp, Artificial sequence
  Synthetic oligonucleotide
taggaaggtggtcctg

SEQ ID NO: 2254 - DNA, 16 bp, Artificial sequence
  Synthetic oligonucleotide
acgatgccatcttgac

SEQ ID NO: 2255 - DNA, 16 bp, Artificial sequence
  Synthetic oligonucleotide
ggagtgtgtcctgagc

SEQ ID NO: 2256 - DNA, 16 bp, Artificial sequence
  Synthetic oligonucleotide
gtaacaagtcaaaatc

SEQ ID NO: 2257 - DNA, 16 bp, Artificial sequence
  Synthetic oligonucleotide
gcttcggtccacacta

SEQ ID NO: 2258 - DNA, 16 bp, Artificial sequence
  Synthetic oligonucleotide
gaggatagtcctctaa

SEQ ID NO: 2259 - DNA, 16 bp, Artificial sequence
  Synthetic oligonucleotide
cccattgaagtcgatc

SEQ ID NO: 2260 - DNA, 16 bp, Artificial sequence
  Synthetic oligonucleotide
cctgttgatcgcagcg

SEQ ID NO: 2261 - DNA, 16 bp, Artificial sequence
  Synthetic oligonucleotide
tgcattatctgaaccc

SEQ ID NO: 2262 - DNA, 16 bp, Artificial sequence
  Synthetic oligonucleotide
cggtaatctttcttca

SEQ ID NO: 2263 - DNA, 16 bp, Artificial sequence
  Synthetic oligonucleotide
gtcttcaatgcactgg

SEQ ID NO: 2264 - DNA, 16 bp, Artificial sequence
  Synthetic oligonucleotide
ggtcaaacagcaactc

SEQ ID NO: 2265 - DNA, 16 bp, Artificial sequence
  Synthetic oligonucleotide
atcttgtggatgggtg

SEQ ID NO: 2266 - DNA, 16 bp, Artificial sequence
  Synthetic oligonucleotide
aggagaatgtctcccc

SEQ ID NO: 2267 - DNA, 16 bp, Artificial sequence
  Synthetic oligonucleotide
ggcaaggctcttgcca

SEQ ID NO: 2268 - DNA, 16 bp, Artificial sequence
  Synthetic oligonucleotide
aaagcagacacatccg

SEQ ID NO: 2269 - DNA, 16 bp, Artificial sequence
  Synthetic oligonucleotide
accccttttcgaattt

SEQ ID NO: 2270 - DNA, 16 bp, Artificial sequence
  Synthetic oligonucleotide
agtaggaggtcctctc

SEQ ID NO: 2271 - DNA, 16 bp, Artificial sequence
  Synthetic oligonucleotide
tgcacgaagtcctcct

SEQ ID NO: 2272 - DNA, 16 bp, Artificial sequence
  Synthetic oligonucleotide
gtgactccacccgatg

SEQ ID NO: 2273 - DNA, 16 bp, Artificial sequence
  Synthetic oligonucleotide
ccatatcaaggtgtcg

SEQ ID NO: 2274 - DNA, 16 bp, Artificial sequence
  Synthetic oligonucleotide
caccaatccatgagaa

SEQ ID NO: 2275 - DNA, 16 bp, Artificial sequence
  Synthetic oligonucleotide
gaatgttacagccagg

SEQ ID NO: 2276 - DNA, 16 bp, Artificial sequence
  Synthetic oligonucleotide
agattgcacaacaggt

SEQ ID NO: 2277 - DNA, 16 bp, Artificial sequence
  Synthetic oligonucleotide
ctgatgcaagatcctg

SEQ ID NO: 2278 - DNA, 16 bp, Artificial sequence
  Synthetic oligonucleotide
cattctcccccacata

SEQ ID NO: 2279 - DNA, 16 bp, Artificial sequence
  Synthetic oligonucleotide
aggttacactgtggat

SEQ ID NO: 2280 - DNA, 16 bp, Artificial sequence
  Synthetic oligonucleotide
accgaggacaaagctg

SEQ ID NO: 2281 - DNA, 16 bp, Artificial sequence
  Synthetic oligonucleotide
gtgttgcctcgcaggt

SEQ ID NO: 2282 - DNA, 16 bp, Artificial sequence
  Synthetic oligonucleotide
ggtgcaagagtccctc

SEQ ID NO: 2283 - DNA, 16 bp, Artificial sequence
  Synthetic oligonucleotide
ggtcattgttgcccag

SEQ ID NO: 2284 - DNA, 16 bp, Artificial sequence
  Synthetic oligonucleotide
cctaccaagaaggctc

SEQ ID NO: 2285 - DNA, 16 bp, Artificial sequence
  Synthetic oligonucleotide
tgcacaggaaggcatc

SEQ ID NO: 2286 - DNA, 16 bp, Artificial sequence
  Synthetic oligonucleotide
aattacatgaggtcac

SEQ ID NO: 2287 - DNA, 16 bp, Artificial sequence
  Synthetic oligonucleotide
tgtgttatggtcagtt

SEQ ID NO: 2288 - DNA, 16 bp, Artificial sequence
  Synthetic oligonucleotide
cccaacccatgagaac

SEQ ID NO: 2289 - DNA, 16 bp, Artificial sequence
  Synthetic oligonucleotide
catagttgaacccgga

SEQ ID NO: 2290 - DNA, 16 bp, Artificial sequence
  Synthetic oligonucleotide
catactaacttctgtg

SEQ ID NO: 2291 - DNA, 16 bp, Artificial sequence
  Synthetic oligonucleotide
cttgaatgtgccataa

SEQ ID NO: 2292 - DNA, 16 bp, Artificial sequence
  Synthetic oligonucleotide
ctataggagaaattca

SEQ ID NO: 2293 - DNA, 16 bp, Artificial sequence
  Synthetic oligonucleotide
gaactattatcacaga

SEQ ID NO: 2294 - DNA, 16 bp, Artificial sequence
  Synthetic oligonucleotide
aagaagaagctggcga

SEQ ID NO: 2295 - DNA, 16 bp, Artificial sequence
  Synthetic oligonucleotide
tctaagaaacatcccc

SEQ ID NO: 2296 - DNA, 16 bp, Artificial sequence
  Synthetic oligonucleotide
gctgagcctcctaccg

SEQ ID NO: 2297 - DNA, 16 bp, Artificial sequence
  Synthetic oligonucleotide
cctaccagggctccag

SEQ ID NO: 2298 - DNA, 16 bp, Artificial sequence
  Synthetic oligonucleotide
ctcagagtaaggcagg

SEQ ID NO: 2299 - DNA, 16 bp, Artificial sequence
  Synthetic oligonucleotide
cagggctccaatcaga

SEQ ID NO: 2300 - DNA, 16 bp, Artificial sequence
  Synthetic oligonucleotide
ctcatatgaacttgca

SEQ ID NO: 2301 - DNA, 16 bp, Artificial sequence
  Synthetic oligonucleotide
tgacatttcaacccat

SEQ ID NO: 2302 - DNA, 16 bp, Artificial sequence
  Synthetic oligonucleotide
ccagaatcatacaggg

SEQ ID NO: 2303 - DNA, 16 bp, Artificial sequence
  Synthetic oligonucleotide
gcacaaggcacattgg

SEQ ID NO: 2304 - DNA, 16 bp, Artificial sequence
  Synthetic oligonucleotide
gcatcaggacacacct

SEQ ID NO: 2305 - DNA, 16 bp, Artificial sequence
  Synthetic oligonucleotide
caatatgaggacccag

SEQ ID NO: 2306 - DNA, 16 bp, Artificial sequence
  Synthetic oligonucleotide
accattaaacaatgtc

SEQ ID NO: 2307 - DNA, 16 bp, Artificial sequence
  Synthetic oligonucleotide
ctgaccaaagtaaccc

SEQ ID NO: 2308 - DNA, 16 bp, Artificial sequence
  Synthetic oligonucleotide
agtgtaagagtcctct

SEQ ID NO: 2309 - DNA, 16 bp, Artificial sequence
  Synthetic oligonucleotide
gatacaggaaagtggt

SEQ ID NO: 2310 - DNA, 16 bp, Artificial sequence
  Synthetic oligonucleotide
aggtttagcaaagcta

SEQ ID NO: 2311 - DNA, 16 bp, Artificial sequence
  Synthetic oligonucleotide
gtaataccctaaggcg

SEQ ID NO: 2312 - DNA, 16 bp, Artificial sequence
  Synthetic oligonucleotide
aggtattgacaatagt

SEQ ID NO: 2313 - DNA, 16 bp, Artificial sequence
  Synthetic oligonucleotide
gattatataacaatct

SEQ ID NO: 2314 - DNA, 16 bp, Artificial sequence
  Synthetic oligonucleotide
gcaaaatgtgtcagca

SEQ ID NO: 2315 - DNA, 16 bp, Artificial sequence
  Synthetic oligonucleotide
gatattatgccccaat

SEQ ID NO: 2316 - DNA, 16 bp, Artificial sequence
  Synthetic oligonucleotide
aaaatgtagctatacc

SEQ ID NO: 2317 - DNA, 16 bp, Artificial sequence
  Synthetic oligonucleotide
atcatagcaagtcccc

SEQ ID NO: 2318 - DNA, 16 bp, Artificial sequence
  Synthetic oligonucleotide
ctacatttaccaagca

SEQ ID NO: 2319 - DNA, 16 bp, Artificial sequence
  Synthetic oligonucleotide
gagtagaatggattat

SEQ ID NO: 2320 - DNA, 16 bp, Artificial sequence
  Synthetic oligonucleotide
agtgattatccatcca

SEQ ID NO: 2321 - DNA, 16 bp, Artificial sequence
  Synthetic oligonucleotide
catcaatctcgatgga

SEQ ID NO: 2322 - DNA, 16 bp, Artificial sequence
  Synthetic oligonucleotide
acagattatcttgtgg

SEQ ID NO: 2323 - DNA, 16 bp, Artificial sequence
  Synthetic oligonucleotide
ccaagattttagcatc

SEQ ID NO: 2324 - DNA, 16 bp, Artificial sequence
  Synthetic oligonucleotide
acacattggacatgat

SEQ ID NO: 2325 - DNA, 16 bp, Artificial sequence
  Synthetic oligonucleotide
ggaatattggcttgtc

SEQ ID NO: 2326 - DNA, 16 bp, Artificial sequence
  Synthetic oligonucleotide
gaagaggactctcgcc

SEQ ID NO: 2327 - DNA, 16 bp, Artificial sequence
  Synthetic oligonucleotide
tacttaaaggtgaggc

SEQ ID NO: 2328 - DNA, 16 bp, Artificial sequence
  Synthetic oligonucleotide
tcactaacctgatcaa

SEQ ID NO: 2329 - DNA, 16 bp, Artificial sequence
  Synthetic oligonucleotide
gctcagcatgtgtgac

SEQ ID NO: 2330 - DNA, 16 bp, Artificial sequence
  Synthetic oligonucleotide
catgcatctgtgttga

SEQ ID NO: 2331 - DNA, 16 bp, Artificial sequence
  Synthetic oligonucleotide
ccttaagcacttcaca

SEQ ID NO: 2332 - DNA, 16 bp, Artificial sequence
  Synthetic oligonucleotide
tcacgatgccatcttg

SEQ ID NO: 2333 - DNA, 16 bp, Artificial sequence
  Synthetic oligonucleotide
aggagtgtgtcctgag

SEQ ID NO: 2334 - DNA, 16 bp, Artificial sequence
  Synthetic oligonucleotide
gactgtaacaagtcaa

SEQ ID NO: 2335 - DNA, 16 bp, Artificial sequence
  Synthetic oligonucleotide
cttaggcttcggtcca

SEQ ID NO: 2336 - DNA, 16 bp, Artificial sequence
  Synthetic oligonucleotide
ggaggatagtcctcta

SEQ ID NO: 2337 - DNA, 16 bp, Artificial sequence
  Synthetic oligonucleotide
tccccattgaagtcga

SEQ ID NO: 2338 - DNA, 16 bp, Artificial sequence
  Synthetic oligonucleotide
tcctgttgatcgcagc

SEQ ID NO: 2339 - DNA, 16 bp, Artificial sequence
  Synthetic oligonucleotide
gtgcattatctgaacc

SEQ ID NO: 2340 - DNA, 16 bp, Artificial sequence
  Synthetic oligonucleotide
acggtaatctttcttc

SEQ ID NO: 2341 - DNA, 16 bp, Artificial sequence
  Synthetic oligonucleotide
tgtcttcaatgcactg

SEQ ID NO: 2342 - DNA, 16 bp, Artificial sequence
  Synthetic oligonucleotide
gctcagaatgctcatc

SEQ ID NO: 2343 - DNA, 16 bp, Artificial sequence
  Synthetic oligonucleotide
cgatcttgtggatggg

SEQ ID NO: 2344 - DNA, 16 bp, Artificial sequence
  Synthetic oligonucleotide
caggagaatgtctccc

SEQ ID NO: 2345 - DNA, 16 bp, Artificial sequence
  Synthetic oligonucleotide
gggcaaggctcttgcc

SEQ ID NO: 2346 - DNA, 16 bp, Artificial sequence
  Synthetic oligonucleotide
gttcatcctcaggaaa

SEQ ID NO: 2347 - DNA, 16 bp, Artificial sequence
  Synthetic oligonucleotide
ataccccttttcgaat

SEQ ID NO: 2348 - DNA, 16 bp, Artificial sequence
  Synthetic oligonucleotide
ccaagtaggaggtcct

SEQ ID NO: 2349 - DNA, 16 bp, Artificial sequence
  Synthetic oligonucleotide
ttgcacgaagtcctcc

SEQ ID NO: 2350 - DNA, 16 bp, Artificial sequence
  Synthetic oligonucleotide
cagtgactccacccga

SEQ ID NO: 2351 - DNA, 16 bp, Artificial sequence
  Synthetic oligonucleotide
accatatcaaggtgtc

SEQ ID NO: 2352 - DNA, 16 bp, Artificial sequence
  Synthetic oligonucleotide
gttcaccaatccatga

SEQ ID NO: 2353 - DNA, 16 bp, Artificial sequence
  Synthetic oligonucleotide
cgaatgttacagccag

SEQ ID NO: 2354 - DNA, 16 bp, Artificial sequence
  Synthetic oligonucleotide
tcagattgcacaacag

SEQ ID NO: 2355 - DNA, 16 bp, Artificial sequence
  Synthetic oligonucleotide
actgatgcaagatcct

SEQ ID NO: 2356 - DNA, 16 bp, Artificial sequence
  Synthetic oligonucleotide
gcattctcccccacat

SEQ ID NO: 2357 - DNA, 16 bp, Artificial sequence
  Synthetic oligonucleotide
caggttacactgtgga

SEQ ID NO: 2358 - DNA, 16 bp, Artificial sequence
  Synthetic oligonucleotide
tgagtaccgaggacaa

SEQ ID NO: 2359 - DNA, 16 bp, Artificial sequence
  Synthetic oligonucleotide
agtgttgcctcgcagg

SEQ ID NO: 2360 - DNA, 16 bp, Artificial sequence
  Synthetic oligonucleotide
cacctgaagcttgcag

SEQ ID NO: 2361 - DNA, 16 bp, Artificial sequence
  Synthetic oligonucleotide
aggtcattgttgccca

SEQ ID NO: 2362 - DNA, 16 bp, Artificial sequence
  Synthetic oligonucleotide
tcctaccaagaaggct

SEQ ID NO: 2363 - DNA, 16 bp, Artificial sequence
  Synthetic oligonucleotide
atgcccaagctctgca

SEQ ID NO: 2364 - DNA, 16 bp, Artificial sequence
  Synthetic oligonucleotide
ctaattacatgaggtc

SEQ ID NO: 2365 - DNA, 16 bp, Artificial sequence
  Synthetic oligonucleotide
ctgtgttatggtcagt

SEQ ID NO: 2366 - DNA, 16 bp, Artificial sequence
  Synthetic oligonucleotide
ccccaacccatgagaa

SEQ ID NO: 2367 - DNA, 16 bp, Artificial sequence
  Synthetic oligonucleotide
aacatagttgaacccg

SEQ ID NO: 2368 - DNA, 16 bp, Artificial sequence
  Synthetic oligonucleotide
atcatactaacttctg

SEQ ID NO: 2369 - DNA, 16 bp, Artificial sequence
  Synthetic oligonucleotide
aataccagaagctgtt

SEQ ID NO: 2370 - DNA, 16 bp, Artificial sequence
  Synthetic oligonucleotide
cttaagaaggcattct

SEQ ID NO: 2371 - DNA, 16 bp, Artificial sequence
  Synthetic oligonucleotide
gcattatctgaaccta

SEQ ID NO: 2372 - DNA, 16 bp, Artificial sequence
  Synthetic oligonucleotide
gtatttggaagatagt

SEQ ID NO: 2373 - DNA, 16 bp, Artificial sequence
  Synthetic oligonucleotide
ttaaaggaggcttaga

SEQ ID NO: 2374 - DNA, 16 bp, Artificial sequence
  Synthetic oligonucleotide
tgctgagcctcctacc

SEQ ID NO: 2375 - DNA, 16 bp, Artificial sequence
  Synthetic oligonucleotide
cccctaccagggctcc

SEQ ID NO: 2376 - DNA, 16 bp, Artificial sequence
  Synthetic oligonucleotide
cctcagagtaaggcag

SEQ ID NO: 2377 - DNA, 16 bp, Artificial sequence
  Synthetic oligonucleotide
gccagggctccaatca

SEQ ID NO: 2378 - DNA, 16 bp, Artificial sequence
  Synthetic oligonucleotide
gatcttagactttcgg

SEQ ID NO: 2379 - DNA, 16 bp, Artificial sequence
  Synthetic oligonucleotide
gactttaacacttgct

SEQ ID NO: 2380 - DNA, 16 bp, Artificial sequence
  Synthetic oligonucleotide
tccagaatcatacagg

SEQ ID NO: 2381 - DNA, 16 bp, Artificial sequence
  Synthetic oligonucleotide
aatacagcacaaggca

SEQ ID NO: 2382 - DNA, 16 bp, Artificial sequence
  Synthetic oligonucleotide
agcatcaggacacacc

SEQ ID NO: 2383 - DNA, 16 bp, Artificial sequence
  Synthetic oligonucleotide
acaatatgaggaccca

SEQ ID NO: 2384 - DNA, 16 bp, Artificial sequence
  Synthetic oligonucleotide
gtttttacctccttac

SEQ ID NO: 2385 - DNA, 16 bp, Artificial sequence
  Synthetic oligonucleotide
cagtgtaagagtcctc

SEQ ID NO: 2386 - DNA, 16 bp, Artificial sequence
  Synthetic oligonucleotide
gggaaagtgatacagg

SEQ ID NO: 2387 - DNA, 16 bp, Artificial sequence
  Synthetic oligonucleotide
gtaagatgaggtttag

SEQ ID NO: 2388 - DNA, 16 bp, Artificial sequence
  Synthetic oligonucleotide
gggtaataccctaagg

SEQ ID NO: 2389 - DNA, 16 bp, Artificial sequence
  Synthetic oligonucleotide
gctctgtttgtgatac

SEQ ID NO: 2390 - DNA, 16 bp, Artificial sequence
  Synthetic oligonucleotide
ggattatataacaatc

SEQ ID NO: 2391 - DNA, 16 bp, Artificial sequence
  Synthetic oligonucleotide
ggcaaaatgtgtcagc

SEQ ID NO: 2392 - DNA, 16 bp, Artificial sequence
  Synthetic oligonucleotide
ggatattatgccccaa

SEQ ID NO: 2393 - DNA, 16 bp, Artificial sequence
  Synthetic oligonucleotide
cccaaagttcgagaga

SEQ ID NO: 2394 - DNA, 16 bp, Artificial sequence
  Synthetic oligonucleotide
ctgtagatgaacccag

SEQ ID NO: 2395 - DNA, 16 bp, Artificial sequence
  Synthetic oligonucleotide
cctaactgagctctac

SEQ ID NO: 2396 - DNA, 16 bp, Artificial sequence
  Synthetic oligonucleotide
aaagttatgcaggctt

SEQ ID NO: 2397 - DNA, 16 bp, Artificial sequence
  Synthetic oligonucleotide
gaaaaagtgattatcc

SEQ ID NO: 2398 - DNA, 16 bp, Artificial sequence
  Synthetic oligonucleotide
gagcataaaaccccaa

SEQ ID NO: 2399 - DNA, 16 bp, Artificial sequence
  Synthetic oligonucleotide
gatacagattatcttg

SEQ ID NO: 2400 - DNA, 16 bp, Artificial sequence
  Synthetic oligonucleotide
cccaagattttagcat

SEQ ID NO: 2401 - DNA, 16 bp, Artificial sequence
  Synthetic oligonucleotide
tcagaatgccaccatg

SEQ ID NO: 2402 - DNA, 16 bp, Artificial sequence
  Synthetic oligonucleotide
gggaatattggcttgt

SEQ ID NO: 2403 - DNA, 16 bp, Artificial sequence
  Synthetic oligonucleotide
tcaggaagaggactct

SEQ ID NO: 2404 - DNA, 16 bp, Artificial sequence
  Synthetic oligonucleotide
gtacttaaaggtgagg

SEQ ID NO: 2405 - DNA, 16 bp, Artificial sequence
  Synthetic oligonucleotide
catttagtcactaacc

SEQ ID NO: 2406 - DNA, 16 bp, Artificial sequence
  Synthetic oligonucleotide
tctcgccagcaaccaa

SEQ ID NO: 2407 - DNA, 16 bp, Artificial sequence
  Synthetic oligonucleotide
gaatgctgatctggct

SEQ ID NO: 2408 - DNA, 16 bp, Artificial sequence
  Synthetic oligonucleotide
tgccatcttgacccat

SEQ ID NO: 2409 - DNA, 16 bp, Artificial sequence
  Synthetic oligonucleotide
aaaggtttccctatgg

SEQ ID NO: 2410 - DNA, 16 bp, Artificial sequence
  Synthetic oligonucleotide
gttagccaaatgctta

SEQ ID NO: 2411 - DNA, 16 bp, Artificial sequence
  Synthetic oligonucleotide
tccacactaagatacc

SEQ ID NO: 2412 - DNA, 16 bp, Artificial sequence
  Synthetic oligonucleotide
gatagtcctctaagtg

SEQ ID NO: 2413 - DNA, 16 bp, Artificial sequence
  Synthetic oligonucleotide
cgtggctagatccaca

SEQ ID NO: 2414 - DNA, 16 bp, Artificial sequence
  Synthetic oligonucleotide
gttgatcgcagcgaag

SEQ ID NO: 2415 - DNA, 16 bp, Artificial sequence
  Synthetic oligonucleotide
attatctgaaccccac

SEQ ID NO: 2416 - DNA, 16 bp, Artificial sequence
  Synthetic oligonucleotide
gagattctcgaaaggt

SEQ ID NO: 2417 - DNA, 16 bp, Artificial sequence
  Synthetic oligonucleotide
ttcaatgcactggaat

SEQ ID NO: 2418 - DNA, 16 bp, Artificial sequence
  Synthetic oligonucleotide
gtcttggtcttgccga

SEQ ID NO: 2419 - DNA, 16 bp, Artificial sequence
  Synthetic oligonucleotide
ctcatgatcaggtccc

SEQ ID NO: 2420 - DNA, 16 bp, Artificial sequence
  Synthetic oligonucleotide
ctccccgctcggcctt

SEQ ID NO: 2421 - DNA, 16 bp, Artificial sequence
  Synthetic oligonucleotide
tgaatcagactgaagg

SEQ ID NO: 2422 - DNA, 16 bp, Artificial sequence
  Synthetic oligonucleotide
agacacatccgccttc

SEQ ID NO: 2423 - DNA, 16 bp, Artificial sequence
  Synthetic oligonucleotide
cgaatttgccatagtt

SEQ ID NO: 2424 - DNA, 16 bp, Artificial sequence
  Synthetic oligonucleotide
ggaggtcctctcctgg

SEQ ID NO: 2425 - DNA, 16 bp, Artificial sequence
  Synthetic oligonucleotide
agtagaacaattccag

SEQ ID NO: 2426 - DNA, 16 bp, Artificial sequence
  Synthetic oligonucleotide
cgatgacagttctcaa

SEQ ID NO: 2427 - DNA, 16 bp, Artificial sequence
  Synthetic oligonucleotide
atcaaggtgtcggcct

SEQ ID NO: 2428 - DNA, 16 bp, Artificial sequence
  Synthetic oligonucleotide
atccatgagaacaggc

SEQ ID NO: 2429 - DNA, 16 bp, Artificial sequence
  Synthetic oligonucleotide
caacactctcatccct

SEQ ID NO: 2430 - DNA, 16 bp, Artificial sequence
  Synthetic oligonucleotide
cagaagtctgattccg

SEQ ID NO: 2431 - DNA, 16 bp, Artificial sequence
  Synthetic oligonucleotide
atgcaagatcctgaca

SEQ ID NO: 2432 - DNA, 16 bp, Artificial sequence
  Synthetic oligonucleotide
ccccacatagagtctg

SEQ ID NO: 2433 - DNA, 16 bp, Artificial sequence
  Synthetic oligonucleotide
ttacactgtggattct

SEQ ID NO: 2434 - DNA, 16 bp, Artificial sequence
  Synthetic oligonucleotide
gacaaagctgaacaac

SEQ ID NO: 2435 - DNA, 16 bp, Artificial sequence
  Synthetic oligonucleotide
cctcgcaggtaaaggt

SEQ ID NO: 2436 - DNA, 16 bp, Artificial sequence
  Synthetic oligonucleotide
aagagtccctcacaga

SEQ ID NO: 2437 - DNA, 16 bp, Artificial sequence
  Synthetic oligonucleotide
gctcagctttcgcagg

SEQ ID NO: 2438 - DNA, 16 bp, Artificial sequence
  Synthetic oligonucleotide
ccaagaaggctcaaag

SEQ ID NO: 2439 - DNA, 16 bp, Artificial sequence
  Synthetic oligonucleotide
cggcaagctctcttct

SEQ ID NO: 2440 - DNA, 16 bp, Artificial sequence
  Synthetic oligonucleotide
caccaagaggaacatc

SEQ ID NO: 2441 - DNA, 16 bp, Artificial sequence
  Synthetic oligonucleotide
gttatggtcagttaat

SEQ ID NO: 2442 - DNA, 16 bp, Artificial sequence
  Synthetic oligonucleotide
tgaattttcaaccagc

SEQ ID NO: 2443 - DNA, 16 bp, Artificial sequence
  Synthetic oligonucleotide
gtagtaagattcacag

SEQ ID NO: 2444 - DNA, 16 bp, Artificial sequence
  Synthetic oligonucleotide
gggaaatggtgcagat

SEQ ID NO: 2445 - DNA, 16 bp, Artificial sequence
  Synthetic oligonucleotide
gcaaagtacttctaca

SEQ ID NO: 2446 - DNA, 16 bp, Artificial sequence
  Synthetic oligonucleotide
gaaattcaggttaggt

SEQ ID NO: 2447 - DNA, 16 bp, Artificial sequence
  Synthetic oligonucleotide
tgcaattgaaacctgg

SEQ ID NO: 2448 - DNA, 16 bp, Artificial sequence
  Synthetic oligonucleotide
cggtaatctacggcaa

SEQ ID NO: 2449 - DNA, 16 bp, Artificial sequence
  Synthetic oligonucleotide
agacattgactgactc

SEQ ID NO: 2450 - DNA, 16 bp, Artificial sequence
  Synthetic oligonucleotide
gggcttcagtgagagt

SEQ ID NO: 2451 - DNA, 16 bp, Artificial sequence
  Synthetic oligonucleotide
ggaaggaaggtgctat

SEQ ID NO: 2452 - DNA, 16 bp, Artificial sequence
  Synthetic oligonucleotide
gagtaaggcaggtgcc

SEQ ID NO: 2453 - DNA, 16 bp, Artificial sequence
  Synthetic oligonucleotide
ggctccaatcagagtc

SEQ ID NO: 2454 - DNA, 16 bp, Artificial sequence
  Synthetic oligonucleotide
gctatatggatctttt

SEQ ID NO: 2455 - DNA, 16 bp, Artificial sequence
  Synthetic oligonucleotide
catagtttttaggtga

SEQ ID NO: 2456 - DNA, 16 bp, Artificial sequence
  Synthetic oligonucleotide
aaacaaccagtctcca

SEQ ID NO: 2457 - DNA, 16 bp, Artificial sequence
  Synthetic oligonucleotide
tgtgaatggtgcgctc

SEQ ID NO: 2458 - DNA, 16 bp, Artificial sequence
  Synthetic oligonucleotide
aggacacacctgacca

SEQ ID NO: 2459 - DNA, 16 bp, Artificial sequence
  Synthetic oligonucleotide
agcatcagaacacacc

SEQ ID NO: 2460 - DNA, 16 bp, Artificial sequence
  Synthetic oligonucleotide
cctataaggacaatca

SEQ ID NO: 2461 - DNA, 16 bp, Artificial sequence
  Synthetic oligonucleotide
ccatgaagacttaccc

SEQ ID NO: 2462 - DNA, 16 bp, Artificial sequence
  Synthetic oligonucleotide
tgcgataacttgcatg

SEQ ID NO: 2463 - DNA, 16 bp, Artificial sequence
  Synthetic oligonucleotide
atgattattagtgggt

SEQ ID NO: 2464 - DNA, 16 bp, Artificial sequence
  Synthetic oligonucleotide
ctaaattggaggtccc

SEQ ID NO: 2465 - DNA, 16 bp, Artificial sequence
  Synthetic oligonucleotide
agatatggtcacatct

SEQ ID NO: 2466 - DNA, 16 bp, Artificial sequence
  Synthetic oligonucleotide
gtaactacatagagca

SEQ ID NO: 2467 - DNA, 16 bp, Artificial sequence
  Synthetic oligonucleotide
tgtaaatggctctctc

SEQ ID NO: 2468 - DNA, 16 bp, Artificial sequence
  Synthetic oligonucleotide
gcaagatgacattcca

SEQ ID NO: 2469 - DNA, 16 bp, Artificial sequence
  Synthetic oligonucleotide
gcatggaaatttatcc

SEQ ID NO: 2470 - DNA, 16 bp, Artificial sequence
  Synthetic oligonucleotide
tacctaacacataggc

SEQ ID NO: 2471 - DNA, 16 bp, Artificial sequence
  Synthetic oligonucleotide
gactcaaaatggagtg

SEQ ID NO: 2472 - DNA, 16 bp, Artificial sequence
  Synthetic oligonucleotide
accaagcacggatatc

SEQ ID NO: 2473 - DNA, 16 bp, Artificial sequence
  Synthetic oligonucleotide
ccaattaaggaagagt

SEQ ID NO: 2474 - DNA, 16 bp, Artificial sequence
  Synthetic oligonucleotide
gtactattcttgagtc

SEQ ID NO: 2475 - DNA, 16 bp, Artificial sequence
  Synthetic oligonucleotide
gattatcttgtggcca

SEQ ID NO: 2476 - DNA, 16 bp, Artificial sequence
  Synthetic oligonucleotide
ctaactagcttcaagc

SEQ ID NO: 2477 - DNA, 16 bp, Artificial sequence
  Synthetic oligonucleotide
tcgggtagaagagagt

SEQ ID NO: 2478 - DNA, 16 bp, Artificial sequence
  Synthetic oligonucleotide
ctccattatgttggca

SEQ ID NO: 2479 - DNA, 16 bp, Artificial sequence
  Synthetic oligonucleotide
cagtctaaagcagctt

SEQ ID NO: 2480 - DNA, 16 bp, Artificial sequence
  Synthetic oligonucleotide
taaaggtgaggccctt

SEQ ID NO: 2481 - DNA, 16 bp, Artificial sequence
  Synthetic oligonucleotide
acacattgcatttgcc

SEQ ID NO: 2482 - DNA, 16 bp, Artificial sequence
  Synthetic oligonucleotide
actatgtaaagaccct

SEQ ID NO: 2483 - DNA, 16 bp, Artificial sequence
  Synthetic oligonucleotide
tgggctaagaaaggtc

SEQ ID NO: 2484 - DNA, 16 bp, Artificial sequence
  Synthetic oligonucleotide
attgagacaggcagta

SEQ ID NO: 2485 - DNA, 16 bp, Artificial sequence
  Synthetic oligonucleotide
gatgtagctgtggcaa

SEQ ID NO: 2486 - DNA, 16 bp, Artificial sequence
  Synthetic oligonucleotide
gggaattccgacacat

SEQ ID NO: 2487 - DNA, 16 bp, Artificial sequence
  Synthetic oligonucleotide
tatcgagcatcatggt

SEQ ID NO: 2488 - DNA, 16 bp, Artificial sequence
  Synthetic oligonucleotide
ctctcctagtgtagag

SEQ ID NO: 2489 - DNA, 16 bp, Artificial sequence
  Synthetic oligonucleotide
gtgcagtaacatatcc

SEQ ID NO: 2490 - DNA, 16 bp, Artificial sequence
  Synthetic oligonucleotide
aagtgaagcgggcggt

SEQ ID NO: 2491 - DNA, 16 bp, Artificial sequence
  Synthetic oligonucleotide
tttgtaagtgaagcgg

SEQ ID NO: 2492 - DNA, 16 bp, Artificial sequence
  Synthetic oligonucleotide
caaggaagcacccgta

SEQ ID NO: 2493 - DNA, 16 bp, Artificial sequence
  Synthetic oligonucleotide
ataatgtccccgaggc

SEQ ID NO: 2494 - DNA, 16 bp, Artificial sequence
  Synthetic oligonucleotide
taggtattgacaatag

SEQ ID NO: 2495 - DNA, 16 bp, Artificial sequence
  Synthetic oligonucleotide
gagtcaaattaagccc

SEQ ID NO: 2496 - DNA, 16 bp, Artificial sequence
  Synthetic oligonucleotide
tggtgatacggttact

SEQ ID NO: 2497 - DNA, 16 bp, Artificial sequence
  Synthetic oligonucleotide
agcagtattgagacag

SEQ ID NO: 2498 - DNA, 16 bp, Artificial sequence
  Synthetic oligonucleotide
agcagctcatgatcag

SEQ ID NO: 2499 - DNA, 16 bp, Artificial sequence
  Synthetic oligonucleotide
ggaattccgacacatg

SEQ ID NO: 2500 - DNA, 16 bp, Artificial sequence
  Synthetic oligonucleotide
atgtagctgtggcaac

SEQ ID NO: 2501 - DNA, 16 bp, Artificial sequence
  Synthetic oligonucleotide
tgtagaggctgcatgc

SEQ ID NO: 2502 - DNA, 16 bp, Artificial sequence
  Synthetic oligonucleotide
cgacctataaggaccc

SEQ ID NO: 2503 - DNA, 16 bp, Artificial sequence
  Synthetic oligonucleotide
ttaacacttgctgtgc

SEQ ID NO: 2504 - DNA, 16 bp, Artificial sequence
  Synthetic oligonucleotide
agacactagagcctca

SEQ ID NO: 2505 - DNA, 16 bp, Artificial sequence
  Synthetic oligonucleotide
atgatatgtttacacc

SEQ ID NO: 2506 - DNA, 16 bp, Artificial sequence
  Synthetic oligonucleotide
gcagagcatttaggac

SEQ ID NO: 2507 - DNA, 16 bp, Artificial sequence
  Synthetic oligonucleotide
ttatatgcctccagtc

SEQ ID NO: 2508 - DNA, 16 bp, Artificial sequence
  Synthetic oligonucleotide
attatcttattagcag

SEQ ID NO: 2509 - DNA, 16 bp, Artificial sequence
  Synthetic oligonucleotide
tttaagccaccgaaca

SEQ ID NO: 2510 - DNA, 16 bp, Artificial sequence
  Synthetic oligonucleotide
taacacttgctgtgca

SEQ ID NO: 2511 - DNA, 16 bp, Artificial sequence
  Synthetic oligonucleotide
tcttgattagtttccc

SEQ ID NO: 2512 - DNA, 16 bp, Artificial sequence
  Synthetic oligonucleotide
tgacgatttcatccca

SEQ ID NO: 2513 - DNA, 16 bp, Artificial sequence
  Synthetic oligonucleotide
atatgtttacaccaag

SEQ ID NO: 2514 - DNA, 16 bp, Artificial sequence
  Synthetic oligonucleotide
tgattaatgccactta

SEQ ID NO: 2515 - DNA, 16 bp, Artificial sequence
  Synthetic oligonucleotide
ggctatacctaacacg

SEQ ID NO: 2516 - DNA, 16 bp, Artificial sequence
  Synthetic oligonucleotide
aaggtactccagtaaa

SEQ ID NO: 2517 - DNA, 16 bp, Artificial sequence
  Synthetic oligonucleotide
atcgagcatcatggtt

SEQ ID NO: 2518 - DNA, 16 bp, Artificial sequence
  Synthetic oligonucleotide
ctttcctagtgtagag

SEQ ID NO: 2519 - DNA, 16 bp, Artificial sequence
  Synthetic oligonucleotide
tcaacccatacaaagc

SEQ ID NO: 2520 - DNA, 16 bp, Artificial sequence
  Synthetic oligonucleotide
taatgtccccgaggct

SEQ ID NO: 2521 - DNA, 16 bp, Artificial sequence
  Synthetic oligonucleotide
agtcaaattgccaagg

SEQ ID NO: 2522 - DNA, 16 bp, Artificial sequence
  Synthetic oligonucleotide
tatgtttacaccaagc

SEQ ID NO: 2523 - DNA, 16 bp, Artificial sequence
  Synthetic oligonucleotide
gattaatgccacttat

SEQ ID NO: 2524 - DNA, 16 bp, Artificial sequence
  Synthetic oligonucleotide
tgagacaggcagtaca

SEQ ID NO: 2525 - DNA, 16 bp, Artificial sequence
  Synthetic oligonucleotide
cagagcatttaggacc

SEQ ID NO: 2526 - DNA, 16 bp, Artificial sequence
  Synthetic oligonucleotide
gatcaggtcccccagg

SEQ ID NO: 2527 - DNA, 16 bp, Artificial sequence
  Synthetic oligonucleotide
gactctggctggtgct

SEQ ID NO: 2528 - DNA, 16 bp, Artificial sequence
  Synthetic oligonucleotide
ctccatcttaatggga

SEQ ID NO: 2529 - DNA, 16 bp, Artificial sequence
  Synthetic oligonucleotide
ttaagccaccgaacag

SEQ ID NO: 2530 - DNA, 16 bp, Artificial sequence
  Synthetic oligonucleotide
agtgaagcgggcggtg

SEQ ID NO: 2531 - DNA, 16 bp, Artificial sequence
  Synthetic oligonucleotide
atacacctgaccagag

SEQ ID NO: 2532 - DNA, 16 bp, Artificial sequence
  Synthetic oligonucleotide
ccatggacaaggaagc

SEQ ID NO: 2533 - DNA, 16 bp, Artificial sequence
  Synthetic oligonucleotide
ttaatgccacttatag

SEQ ID NO: 2534 - DNA, 16 bp, Artificial sequence
  Synthetic oligonucleotide
gagacaggcagtacac

SEQ ID NO: 2535 - DNA, 16 bp, Artificial sequence
  Synthetic oligonucleotide
agctcatgatcaggtc

SEQ ID NO: 2536 - DNA, 16 bp, Artificial sequence
  Synthetic oligonucleotide
tcagagtaaggcagct

SEQ ID NO: 2537 - DNA, 16 bp, Artificial sequence
  Synthetic oligonucleotide
tatatgcctccagtcc

SEQ ID NO: 2538 - DNA, 16 bp, Artificial sequence
  Synthetic oligonucleotide
tagtttccccgtcaca

SEQ ID NO: 2539 - DNA, 16 bp, Artificial sequence
  Synthetic oligonucleotide
aaggaagcacccgtac

SEQ ID NO: 2540 - DNA, 16 bp, Artificial sequence
  Synthetic oligonucleotide
atggacaaggaagcac

SEQ ID NO: 2541 - DNA, 16 bp, Artificial sequence
  Synthetic oligonucleotide
ccaatcgatagatcta

SEQ ID NO: 2542 - DNA, 16 bp, Artificial sequence
  Synthetic oligonucleotide
ctatacctaacacaca

SEQ ID NO: 2543 - DNA, 16 bp, Artificial sequence
  Synthetic oligonucleotide
aattgagaggtatatg

SEQ ID NO: 2544 - DNA, 16 bp, Artificial sequence
  Synthetic oligonucleotide
ctcgactgattaatgc

SEQ ID NO: 2545 - DNA, 16 bp, Artificial sequence
  Synthetic oligonucleotide
ttggaacaggttcatc

SEQ ID NO: 2546 - DNA, 16 bp, Artificial sequence
  Synthetic oligonucleotide
aacaaccacttcacga

SEQ ID NO: 2547 - DNA, 16 bp, Artificial sequence
  Synthetic oligonucleotide
tcgagcatcatggttg

SEQ ID NO: 2548 - DNA, 16 bp, Artificial sequence
  Synthetic oligonucleotide
gtaaggcagctgccat

SEQ ID NO: 2549 - DNA, 16 bp, Artificial sequence
  Synthetic oligonucleotide
tctcctagtgtagagg

SEQ ID NO: 2550 - DNA, 16 bp, Artificial sequence
  Synthetic oligonucleotide
ttgtaagtgaagcggg

SEQ ID NO: 2551 - DNA, 16 bp, Artificial sequence
  Synthetic oligonucleotide
atgtagctatacctaa

SEQ ID NO: 2552 - DNA, 16 bp, Artificial sequence
  Synthetic oligonucleotide
ctccagtcagagtctg

SEQ ID NO: 2553 - DNA, 16 bp, Artificial sequence
  Synthetic oligonucleotide
atatgcctccagtcct

SEQ ID NO: 2554 - DNA, 16 bp, Artificial sequence
  Synthetic oligonucleotide
tttcctagtgtagagg

SEQ ID NO: 2555 - DNA, 16 bp, Artificial sequence
  Synthetic oligonucleotide
caacccatacaaagca

SEQ ID NO: 2556 - DNA, 16 bp, Artificial sequence
  Synthetic oligonucleotide
tctatgaacatggccc

SEQ ID NO: 2557 - DNA, 16 bp, Artificial sequence
  Synthetic oligonucleotide
gtgaagcgggcggtgt

SEQ ID NO: 2558 - DNA, 16 bp, Artificial sequence
  Synthetic oligonucleotide
tcgactgattaatgcc

SEQ ID NO: 2559 - DNA, 16 bp, Artificial sequence
  Synthetic oligonucleotide
ttatgatgtagctgtg

SEQ ID NO: 2560 - DNA, 16 bp, Artificial sequence
  Synthetic oligonucleotide
atatgaggacccaggg

SEQ ID NO: 2561 - DNA, 16 bp, Artificial sequence
  Synthetic oligonucleotide
ctcctagtgtagaggc

SEQ ID NO: 2562 - DNA, 16 bp, Artificial sequence
  Synthetic oligonucleotide
acccatacaaagcatt

SEQ ID NO: 2563 - DNA, 16 bp, Artificial sequence
  Synthetic oligonucleotide
taagccaccgaacagc

SEQ ID NO: 2564 - DNA, 16 bp, Artificial sequence
  Synthetic oligonucleotide
aggaagcacccgtacc

SEQ ID NO: 2565 - DNA, 16 bp, Artificial sequence
  Synthetic oligonucleotide
tggacaaggaagcacc

SEQ ID NO: 2566 - DNA, 16 bp, Artificial sequence
  Synthetic oligonucleotide
atgccccaatcgatag

SEQ ID NO: 2567 - DNA, 16 bp, Artificial sequence
  Synthetic oligonucleotide
attacatgaggtcacc

SEQ ID NO: 2568 - DNA, 16 bp, Artificial sequence
  Synthetic oligonucleotide
tatttggtgatacggt

SEQ ID NO: 2569 - DNA, 16 bp, Artificial sequence
  Synthetic oligonucleotide
tttaggaccgtccccc

SEQ ID NO: 2570 - DNA, 16 bp, Artificial sequence
  Synthetic oligonucleotide
ctcccgtcagagtctg

SEQ ID NO: 2571 - DNA, 16 bp, Artificial sequence
  Synthetic oligonucleotide
gtttacaccaagcatg

SEQ ID NO: 2572 - DNA, 16 bp, Artificial sequence
  Synthetic oligonucleotide
agagcatttaggaccg

SEQ ID NO: 2573 - DNA, 16 bp, Artificial sequence
  Synthetic oligonucleotide
cgagcatcatggttgt

SEQ ID NO: 2574 - DNA, 16 bp, Artificial sequence
  Synthetic oligonucleotide
tatgaggacccagggc

SEQ ID NO: 2575 - DNA, 16 bp, Artificial sequence
  Synthetic oligonucleotide
gtacgacctataagga

SEQ ID NO: 2576 - DNA, 16 bp, Artificial sequence
  Synthetic oligonucleotide
cccatacaaagcattc

SEQ ID NO: 2577 - DNA, 16 bp, Artificial sequence
  Synthetic oligonucleotide
tgattagtttccccgt

SEQ ID NO: 2578 - DNA, 16 bp, Artificial sequence
  Synthetic oligonucleotide
gatgaagagtgtgatc

SEQ ID NO: 2579 - DNA, 16 bp, Artificial sequence
  Synthetic oligonucleotide
tgaagcgggcggtgtg

SEQ ID NO: 2580 - DNA, 16 bp, Artificial sequence
  Synthetic oligonucleotide
tgtaagtgaagcgggc

SEQ ID NO: 2581 - DNA, 16 bp, Artificial sequence
  Synthetic oligonucleotide
ttattagtgggtattc

SEQ ID NO: 2582 - DNA, 16 bp, Artificial sequence
  Synthetic oligonucleotide
cagtattgagacaggc

SEQ ID NO: 2583 - DNA, 16 bp, Artificial sequence
  Synthetic oligonucleotide
gtagaacttctcgcag

SEQ ID NO: 2584 - DNA, 16 bp, Artificial sequence
  Synthetic oligonucleotide
agggacagtgactcca

SEQ ID NO: 2585 - DNA, 16 bp, Artificial sequence
  Synthetic oligonucleotide
ccatcttaatgggact

SEQ ID NO: 2586 - DNA, 16 bp, Artificial sequence
  Synthetic oligonucleotide
gcggactttaacactt

SEQ ID NO: 2587 - DNA, 16 bp, Artificial sequence
  Synthetic oligonucleotide
tacacctgaccagaga

SEQ ID NO: 2588 - DNA, 16 bp, Artificial sequence
  Synthetic oligonucleotide
tttacaccaagcatgt

SEQ ID NO: 2589 - DNA, 16 bp, Artificial sequence
  Synthetic oligonucleotide
agagtagtttgatccc

SEQ ID NO: 2590 - DNA, 16 bp, Artificial sequence
  Synthetic oligonucleotide
gaaatgggtgctgagc

SEQ ID NO: 2591 - DNA, 16 bp, Artificial sequence
  Synthetic oligonucleotide
tattagcagcagtata

SEQ ID NO: 2592 - DNA, 16 bp, Artificial sequence
  Synthetic oligonucleotide
ctataaggacccagcc

SEQ ID NO: 2593 - DNA, 16 bp, Artificial sequence
  Synthetic oligonucleotide
attaacattaggtctt

SEQ ID NO: 2594 - DNA, 16 bp, Artificial sequence
  Synthetic oligonucleotide
acgatttcatcccagc

SEQ ID NO: 2595 - DNA, 16 bp, Artificial sequence
  Synthetic oligonucleotide
aggttaggtattgaca

SEQ ID NO: 2596 - DNA, 16 bp, Artificial sequence
  Synthetic oligonucleotide
tgccccaatcgataga

SEQ ID NO: 2597 - DNA, 16 bp, Artificial sequence
  Synthetic oligonucleotide
ctggtaactattaagc

SEQ ID NO: 2598 - DNA, 16 bp, Artificial sequence
  Synthetic oligonucleotide
gctatacctaacacac

SEQ ID NO: 2599 - DNA, 16 bp, Artificial sequence
  Synthetic oligonucleotide
ttacaccaagcatgtg

SEQ ID NO: 2600 - DNA, 16 bp, Artificial sequence
  Synthetic oligonucleotide
gatcttgtggatgggt

SEQ ID NO: 2601 - DNA, 16 bp, Artificial sequence
  Synthetic oligonucleotide
gagcatcatggttgtt

SEQ ID NO: 2602 - DNA, 16 bp, Artificial sequence
  Synthetic oligonucleotide
attagcagcagtatac

SEQ ID NO: 2603 - DNA, 16 bp, Artificial sequence
  Synthetic oligonucleotide
tacgacctataaggac

SEQ ID NO: 2604 - DNA, 16 bp, Artificial sequence
  Synthetic oligonucleotide
acaaagcattctgacc

SEQ ID NO: 2605 - DNA, 16 bp, Artificial sequence
  Synthetic oligonucleotide
ggacaaggaagcaccc

SEQ ID NO: 2606 - DNA, 16 bp, Artificial sequence
  Synthetic oligonucleotide
tgcatgattattagtg

SEQ ID NO: 2607 - DNA, 16 bp, Artificial sequence
  Synthetic oligonucleotide
tacaccaagcatgtgt

SEQ ID NO: 2608 - DNA, 16 bp, Artificial sequence
  Synthetic oligonucleotide
ttagactctggctggt

SEQ ID NO: 2609 - DNA, 16 bp, Artificial sequence
  Synthetic oligonucleotide
cattatatgcctccag

SEQ ID NO: 2610 - DNA, 16 bp, Artificial sequence
  Synthetic oligonucleotide
gtgtagaggctgcatg

SEQ ID NO: 2611 - DNA, 16 bp, Artificial sequence
  Synthetic oligonucleotide
ctctttcctagtgtag

SEQ ID NO: 2612 - DNA, 16 bp, Artificial sequence
  Synthetic oligonucleotide
caaagcattctgacca

SEQ ID NO: 2613 - DNA, 16 bp, Artificial sequence
  Synthetic oligonucleotide
tgatagacactagagc

SEQ ID NO: 2614 - DNA, 16 bp, Artificial sequence
  Synthetic oligonucleotide
taccccttttcgaatt

SEQ ID NO: 2615 - DNA, 16 bp, Artificial sequence
  Synthetic oligonucleotide
cgatttcatcccagcc

SEQ ID NO: 2616 - DNA, 16 bp, Artificial sequence
  Synthetic oligonucleotide
taactacatagagcat

SEQ ID NO: 2617 - DNA, 16 bp, Artificial sequence
  Synthetic oligonucleotide
tcgatagatctacaca

SEQ ID NO: 2618 - DNA, 16 bp, Artificial sequence
  Synthetic oligonucleotide
ggttaggtattgacaa

SEQ ID NO: 2619 - DNA, 16 bp, Artificial sequence
  Synthetic oligonucleotide
cataaaagtctcgact

SEQ ID NO: 2620 - DNA, 16 bp, Artificial sequence
  Synthetic oligonucleotide
gactgattaatgccac

SEQ ID NO: 2621 - DNA, 16 bp, Artificial sequence
  Synthetic oligonucleotide
gccgatggccagaagc

SEQ ID NO: 2622 - DNA, 16 bp, Artificial sequence
  Synthetic oligonucleotide
agtattgagacaggca

SEQ ID NO: 2623 - DNA, 16 bp, Artificial sequence
  Synthetic oligonucleotide
tagaacttctcgcagt

SEQ ID NO: 2624 - DNA, 16 bp, Artificial sequence
  Synthetic oligonucleotide
gtcacaaggctcacct

SEQ ID NO: 2625 - DNA, 16 bp, Artificial sequence
  Synthetic oligonucleotide
atgatgtagctgtggc

SEQ ID NO: 2626 - DNA, 16 bp, Artificial sequence
  Synthetic oligonucleotide
attatatgcctccagt

SEQ ID NO: 2627 - DNA, 16 bp, Artificial sequence
  Synthetic oligonucleotide
ttaaaggagtgactag

SEQ ID NO: 2628 - DNA, 16 bp, Artificial sequence
  Synthetic oligonucleotide
gtttgacgatttcatc

SEQ ID NO: 2629 - DNA, 16 bp, Artificial sequence
  Synthetic oligonucleotide
atgacagttctcaatg

SEQ ID NO: 2630 - DNA, 16 bp, Artificial sequence
  Synthetic oligonucleotide
taagtgaagcgggcgg

SEQ ID NO: 2631 - DNA, 16 bp, Artificial sequence
  Synthetic oligonucleotide
ccacccgatgacagtt

SEQ ID NO: 2632 - DNA, 16 bp, Artificial sequence
  Synthetic oligonucleotide
cataatgtccccgagg

SEQ ID NO: 2633 - DNA, 16 bp, Artificial sequence
  Synthetic oligonucleotide
gcatgattattagtgg

SEQ ID NO: 2634 - DNA, 16 bp, Artificial sequence
  Synthetic oligonucleotide
tagctatacctaacac

SEQ ID NO: 2635 - DNA, 16 bp, Artificial sequence
  Synthetic oligonucleotide
tctttcctagtgtaga

SEQ ID NO: 2636 - DNA, 16 bp, Artificial sequence
  Synthetic oligonucleotide
tataaggacccagcct

SEQ ID NO: 2637 - DNA, 16 bp, Artificial sequence
  Synthetic oligonucleotide
taaaggagtgactaga

SEQ ID NO: 2638 - DNA, 16 bp, Artificial sequence
  Synthetic oligonucleotide
ttaacattaggtcttg

SEQ ID NO: 2639 - DNA, 16 bp, Artificial sequence
  Synthetic oligonucleotide
cggactttaacacttg

SEQ ID NO: 2640 - DNA, 16 bp, Artificial sequence
  Synthetic oligonucleotide
gatagacactagagcc

SEQ ID NO: 2641 - DNA, 16 bp, Artificial sequence
  Synthetic oligonucleotide
gaatgcatcaggacac

SEQ ID NO: 2642 - DNA, 16 bp, Artificial sequence
  Synthetic oligonucleotide
gccccaatcgatagat

SEQ ID NO: 2643 - DNA, 16 bp, Artificial sequence
  Synthetic oligonucleotide
tggtaactattaagca

SEQ ID NO: 2644 - DNA, 16 bp, Artificial sequence
  Synthetic oligonucleotide
cttgagcagtattgag

SEQ ID NO: 2645 - DNA, 16 bp, Artificial sequence
  Synthetic oligonucleotide
ataaggacccagcctg

SEQ ID NO: 2646 - DNA, 16 bp, Artificial sequence
  Synthetic oligonucleotide
atttaagccaccgaac

SEQ ID NO: 2647 - DNA, 16 bp, Artificial sequence
  Synthetic oligonucleotide
attagtttccccgtca

SEQ ID NO: 2648 - DNA, 16 bp, Artificial sequence
  Synthetic oligonucleotide
gatttcatcccagccc

SEQ ID NO: 2649 - DNA, 16 bp, Artificial sequence
  Synthetic oligonucleotide
atgcatcaggacacac

SEQ ID NO: 2650 - DNA, 16 bp, Artificial sequence
  Synthetic oligonucleotide
aactacatagagcata

SEQ ID NO: 2651 - DNA, 16 bp, Artificial sequence
  Synthetic oligonucleotide
gttaggtattgacaat

SEQ ID NO: 2652 - DNA, 16 bp, Artificial sequence
  Synthetic oligonucleotide
ataaaagtctcgactg

SEQ ID NO: 2653 - DNA, 16 bp, Artificial sequence
  Synthetic oligonucleotide
ggtaactattaagcaa

SEQ ID NO: 2654 - DNA, 16 bp, Artificial sequence
  Synthetic oligonucleotide
tgatgtagctgtggca

SEQ ID NO: 2655 - DNA, 16 bp, Artificial sequence
  Synthetic oligonucleotide
atgcttaccagaaagt

SEQ ID NO: 2656 - DNA, 16 bp, Artificial sequence
  Synthetic oligonucleotide
cgtcagagtctgtcct

SEQ ID NO: 2657 - DNA, 16 bp, Artificial sequence
  Synthetic oligonucleotide
acgacctataaggacc

SEQ ID NO: 2658 - DNA, 16 bp, Artificial sequence
  Synthetic oligonucleotide
tagacactagagcctc

SEQ ID NO: 2659 - DNA, 16 bp, Artificial sequence
  Synthetic oligonucleotide
ggtttgtaagtgaagc

SEQ ID NO: 2660 - DNA, 16 bp, Artificial sequence
  Synthetic oligonucleotide
actacatagagcatat

SEQ ID NO: 2661 - DNA, 16 bp, Artificial sequence
  Synthetic oligonucleotide
ccccaatcgatagatc

SEQ ID NO: 2662 - DNA, 16 bp, Artificial sequence
  Synthetic oligonucleotide
cttgagtcaaattaag

SEQ ID NO: 2663 - DNA, 16 bp, Artificial sequence
  Synthetic oligonucleotide
caggagtgtgtcctga

SEQ ID NO: 2664 - DNA, 16 bp, Artificial sequence
  Synthetic oligonucleotide
ggctttcacttcaatc

SEQ ID NO: 2665 - DNA, 16 bp, Artificial sequence
  Synthetic oligonucleotide
ggactttaacacttgc

SEQ ID NO: 2666 - DNA, 16 bp, Artificial sequence
  Synthetic oligonucleotide
aggccgctctgtttgt

SEQ ID NO: 2667 - DNA, 16 bp, Artificial sequence
  Synthetic oligonucleotide
tctcgactgattaatg

SEQ ID NO: 2668 - DNA, 16 bp, Artificial sequence
  Synthetic oligonucleotide
tcgcagtccacttcct

SEQ ID NO: 2669 - DNA, 16 bp, Artificial sequence
  Synthetic oligonucleotide
tgttacagccaggatg

SEQ ID NO: 2670 - DNA, 16 bp, Artificial sequence
  Synthetic oligonucleotide
agactctggctggtgc

SEQ ID NO: 2671 - DNA, 16 bp, Artificial sequence
  Synthetic oligonucleotide
gattcttgattagttt

SEQ ID NO: 2672 - DNA, 16 bp, Artificial sequence
  Synthetic oligonucleotide
ttgacgatttcatccc

SEQ ID NO: 2673 - DNA, 16 bp, Artificial sequence
  Synthetic oligonucleotide
ttgagacaggcagtac

SEQ ID NO: 2674 - DNA, 16 bp, Artificial sequence
  Synthetic oligonucleotide
gtctctcctgttgatc

SEQ ID NO: 2675 - DNA, 16 bp, Artificial sequence
  Synthetic oligonucleotide
ggtcttgccgatggcc

SEQ ID NO: 2676 - DNA, 16 bp, Artificial sequence
  Synthetic oligonucleotide
cagctcatgatcaggt

SEQ ID NO: 2677 - DNA, 16 bp, Artificial sequence
  Synthetic oligonucleotide
gccgctctgtttgtga

SEQ ID NO: 2678 - DNA, 16 bp, Artificial sequence
  Synthetic oligonucleotide
gccatcttgacccatc

SEQ ID NO: 2679 - DNA, 16 bp, Artificial sequence
  Synthetic oligonucleotide
ttagtttccccgtcac

SEQ ID NO: 2680 - DNA, 16 bp, Artificial sequence
  Synthetic oligonucleotide
gtttgttgaggctcac

SEQ ID NO: 2681 - DNA, 16 bp, Artificial sequence
  Synthetic oligonucleotide
gttccagtcagagtct

SEQ ID NO: 2682 - DNA, 16 bp, Artificial sequence
  Synthetic oligonucleotide
ggtattgacaatagta

SEQ ID NO: 2683 - DNA, 16 bp, Artificial sequence
  Synthetic oligonucleotide
ccgctctgtttgtgat

SEQ ID NO: 2684 - DNA, 16 bp, Artificial sequence
  Synthetic oligonucleotide
ttgttgaggctcacac

SEQ ID NO: 2685 - DNA, 16 bp, Artificial sequence
  Synthetic oligonucleotide
tgtagaacttctcgca

SEQ ID NO: 2686 - DNA, 16 bp, Artificial sequence
  Synthetic oligonucleotide
agtctggtcagggaat

SEQ ID NO: 2687 - DNA, 16 bp, Artificial sequence
  Synthetic oligonucleotide
aatgtccccgaggctc

SEQ ID NO: 2688 - DNA, 16 bp, Artificial sequence
  Synthetic oligonucleotide
tatgccccaatcgata

SEQ ID NO: 2689 - DNA, 16 bp, Artificial sequence
  Synthetic oligonucleotide
aggtactccagtaaac

SEQ ID NO: 2690 - DNA, 16 bp, Artificial sequence
  Synthetic oligonucleotide
cgtcttggtcttgccg

SEQ ID NO: 2691 - DNA, 16 bp, Artificial sequence
  Synthetic oligonucleotide
tcttgccgatggccag

SEQ ID NO: 2692 - DNA, 16 bp, Artificial sequence
  Synthetic oligonucleotide
tgactccacccgatga

SEQ ID NO: 2693 - DNA, 16 bp, Artificial sequence
  Synthetic oligonucleotide
tccatcttaatgggac

SEQ ID NO: 2694 - DNA, 16 bp, Artificial sequence
  Synthetic oligonucleotide
ggtactccagtaaacc

SEQ ID NO: 2695 - DNA, 16 bp, Artificial sequence
  Synthetic oligonucleotide
gactccacccgatgac

SEQ ID NO: 2696 - DNA, 16 bp, Artificial sequence
  Synthetic oligonucleotide
ttcctagtgtagaggc

SEQ ID NO: 2697 - DNA, 16 bp, Artificial sequence
  Synthetic oligonucleotide
tgtacgacctataagg

SEQ ID NO: 2698 - DNA, 16 bp, Artificial sequence
  Synthetic oligonucleotide
agtgcatgattattag

SEQ ID NO: 2699 - DNA, 16 bp, Artificial sequence
  Synthetic oligonucleotide
cgctctgtttgtgata

SEQ ID NO: 2700 - DNA, 16 bp, Artificial sequence
  Synthetic oligonucleotide
actgtgcagtaacata

SEQ ID NO: 2701 - DNA, 16 bp, Artificial sequence
  Synthetic oligonucleotide
gtagctatacctaaca

SEQ ID NO: 2702 - DNA, 16 bp, Artificial sequence
  Synthetic oligonucleotide
tcttggtcttgccgat

SEQ ID NO: 2703 - DNA, 16 bp, Artificial sequence
  Synthetic oligonucleotide
cttgccgatggccaga

SEQ ID NO: 2704 - DNA, 16 bp, Artificial sequence
  Synthetic oligonucleotide
cttctcgcagtccact

SEQ ID NO: 2705 - DNA, 16 bp, Artificial sequence
  Synthetic oligonucleotide
ttctcgcagtccactt

SEQ ID NO: 2706 - DNA, 16 bp, Artificial sequence
  Synthetic oligonucleotide
actccacccgatgaca

SEQ ID NO: 2707 - DNA, 16 bp, Artificial sequence
  Synthetic oligonucleotide
ctgtgcagtaacatat

SEQ ID NO: 2708 - DNA, 16 bp, Artificial sequence
  Synthetic oligonucleotide
ggaagcacccgtacct

SEQ ID NO: 2709 - DNA, 16 bp, Artificial sequence
  Synthetic oligonucleotide
atttggtgatacggtt

SEQ ID NO: 2710 - DNA, 16 bp, Artificial sequence
  Synthetic oligonucleotide
tgtcacaaggctcacc

SEQ ID NO: 2711 - DNA, 16 bp, Artificial sequence
  Synthetic oligonucleotide
cccgtcagagtctgtc

SEQ ID NO: 2712 - DNA, 16 bp, Artificial sequence
  Synthetic oligonucleotide
tgtttgacgatttcat

SEQ ID NO: 2713 - DNA, 16 bp, Artificial sequence
  Synthetic oligonucleotide
cgactgattaatgcca

SEQ ID NO: 2714 - DNA, 16 bp, Artificial sequence
  Synthetic oligonucleotide
ttaggaccgtcccccg

SEQ ID NO: 2715 - DNA, 16 bp, Artificial sequence
  Synthetic oligonucleotide
cttggtcttgccgatg

SEQ ID NO: 2716 - DNA, 16 bp, Artificial sequence
  Synthetic oligonucleotide
agtgtagaggctgcat

SEQ ID NO: 2717 - DNA, 16 bp, Artificial sequence
  Synthetic oligonucleotide
aggacacacctgatca

SEQ ID NO: 2718 - DNA, 16 bp, Artificial sequence
  Synthetic oligonucleotide
ttgccgatggccagaa

SEQ ID NO: 2719 - DNA, 16 bp, Artificial sequence
  Synthetic oligonucleotide
ttggtcttgccgatgg

SEQ ID NO: 2720 - DNA, 16 bp, Artificial sequence
  Synthetic oligonucleotide
tctcgcagtccacttc

SEQ ID NO: 2721 - DNA, 16 bp, Artificial sequence
  Synthetic oligonucleotide
ccgtcagagtctgtcc

SEQ ID NO: 2722 - DNA, 16 bp, Artificial sequence
  Synthetic oligonucleotide
tgtgcagtaacatatc

SEQ ID NO: 2723 - DNA, 16 bp, Artificial sequence
  Synthetic oligonucleotide
agaacttctcgcagtc

SEQ ID NO: 2724 - DNA, 16 bp, Artificial sequence
  Synthetic oligonucleotide
tcctctcctagtgtag

SEQ ID NO: 2725 - DNA, 16 bp, Artificial sequence
  Synthetic oligonucleotide
actctcatctatgaac

SEQ ID NO: 2726 - DNA, 16 bp, Artificial sequence
  Synthetic oligonucleotide
tttggtgatacggtta

SEQ ID NO: 2727 - DNA, 16 bp, Artificial sequence
  Synthetic oligonucleotide
tgacagttctcaatgc

SEQ ID NO: 2728 - DNA, 16 bp, Artificial sequence
  Synthetic oligonucleotide
tgttgaaattgagagg

SEQ ID NO: 2729 - DNA, 16 bp, Artificial sequence
  Synthetic oligonucleotide
tgagcagtattgagac

SEQ ID NO: 2730 - DNA, 16 bp, Artificial sequence
  Synthetic oligonucleotide
tagactctggctggtg

SEQ ID NO: 2731 - DNA, 16 bp, Artificial sequence
  Synthetic oligonucleotide
tttgacgatttcatcc

SEQ ID NO: 2732 - DNA, 16 bp, Artificial sequence
  Synthetic oligonucleotide
cctctcctagtgtaga

SEQ ID NO: 2733 - DNA, 16 bp, Artificial sequence
  Synthetic oligonucleotide
agtgactccacccgat

SEQ ID NO: 2734 - DNA, 16 bp, Artificial sequence
  Synthetic oligonucleotide
  misc_feature (5)..(5): Bases at these positions are RNA
agcaucagaacacacc

SEQ ID NO: 2735 - DNA, 16 bp, Artificial sequence
  Synthetic oligonucleotide
  misc_feature (5)..(5): Bases at these positions are RNA
gctcugtttgtgatac

SEQ ID NO: 2736 - DNA, 16 bp, Artificial sequence
  Synthetic oligonucleotide
  misc_feature (5)..(5): Bases at these positions are RNA
acatuatatgcctcca

SEQ ID NO: 2737 - DNA, 16 bp, Artificial sequence
  Synthetic oligonucleotide
  misc_feature (5)..(5): Bases at these positions are RNA
caggugccatctagag

SEQ ID NO: 2738 - DNA, 16 bp, Artificial sequence
  Synthetic oligonucleotide
  misc_feature (5)..(5): Bases at these positions are RNA
ctagugtagaggctgc

SEQ ID NO: 2739 - DNA, 16 bp, Artificial sequence
  Synthetic oligonucleotide
  misc_feature (5)..(5): Bases at these positions are RNA
ccaaucagagtctgtc

SEQ ID NO: 2740 - DNA, 16 bp, Artificial sequence
  Synthetic oligonucleotide
  misc_feature (5)..(5): Bases at these positions are RNA
ctttucgaatttgcca

SEQ ID NO: 2741 - DNA, 16 bp, Artificial sequence
  Synthetic oligonucleotide
  misc_feature (5)..(5): Bases at these positions are RNA
gtctugccgatggcca

SEQ ID NO: 2742 - DNA, 16 bp, Artificial sequence
  Synthetic oligonucleotide
  misc_feature (5)..(5): Bases at these positions are RNA
aactuctcgcagtcca

SEQ ID NO: 2743 - DNA, 16 bp, Artificial sequence
  Synthetic oligonucleotide
  misc_feature (5)..(5): Bases at these positions are RNA
ccagucagagtctgtc

SEQ ID NO: 2744 - DNA, 16 bp, Artificial sequence
  Synthetic oligonucleotide
  misc_feature (5)..(5): Bases at these positions are RNA
atgtutacaccaagca

SEQ ID NO: 2745 - DNA, 16 bp, Artificial sequence
  Synthetic oligonucleotide
  misc_feature (5)..(5): Bases at these positions are RNA
agcauttaggaccgtc

SEQ ID NO: 2746 - DNA, 16 bp, Artificial sequence
  Synthetic oligonucleotide
  misc_feature (5)..(5): Bases at these positions are RNA
agaguaaggcagctgc

SEQ ID NO: 2747 - DNA, 16 bp, Artificial sequence
  Synthetic oligonucleotide
  misc_feature (5)..(5): Bases at these positions are RNA
gataugtttacaccaa

SEQ ID NO: 2748 - DNA, 16 bp, Artificial sequence
  Synthetic oligonucleotide
  misc_feature (5)..(5): Bases at these positions are RNA
ggaauatatcgagcat

SEQ ID NO: 2749 - DNA, 16 bp, Artificial sequence
  Synthetic oligonucleotide
  misc_feature (5)..(5): Bases at these positions are RNA
aggcuatacctaacac

SEQ ID NO: 2750 - DNA, 16 bp, Artificial sequence
  Synthetic oligonucleotide
  misc_feature (5)..(5): Bases at these positions are RNA
gcaguattgagacagg

SEQ ID NO: 2751 - DNA, 16 bp, Artificial sequence
  Synthetic oligonucleotide
  misc_feature (5)..(5): Bases at these positions are RNA
acagugactccacccg

SEQ ID NO: 2752 - DNA, 16 bp, Artificial sequence
  Synthetic oligonucleotide
  misc_feature (5)..(5): Bases at these positions are RNA
aataugaggacccagg

SEQ ID NO: 2753 - DNA, 16 bp, Artificial sequence
  Synthetic oligonucleotide
  misc_feature (5)..(5): Bases at these positions are RNA
ccctuttcgaatttgc

SEQ ID NO: 2754 - DNA, 16 bp, Artificial sequence
  Synthetic oligonucleotide
  misc_feature (5)..(5): Bases at these positions are RNA
gaccuataaggaccca

SEQ ID NO: 2755 - DNA, 16 bp, Artificial sequence
  Synthetic oligonucleotide
  misc_feature (5)..(5): Bases at these positions are RNA
cgacugattaatgcca

SEQ ID NO: 2756 - DNA, 16 bp, Artificial sequence
  Synthetic oligonucleotide
  misc_feature (5)..(5): Bases at these positions are RNA
gactutaacacttgct

SEQ ID NO: 2757 - DNA, 16 bp, Artificial sequence
  Synthetic oligonucleotide
  misc_feature (5)..(5): Bases at these positions are RNA
agaguaaggcaggtgc

SEQ ID NO: 2758 - DNA, 16 bp, Artificial sequence
  Synthetic oligonucleotide
  misc_feature (5)..(5): Bases at these positions are RNA
catcuatgaacatggc

SEQ ID NO: 2759 - DNA, 16 bp, Artificial sequence
  Synthetic oligonucleotide
  misc_feature (5)..(5): Bases at these positions are RNA
ttatutggtgatacgg

SEQ ID NO: 2760 - DNA, 16 bp, Artificial sequence
  Synthetic oligonucleotide
  misc_feature (5)..(5): Bases at these positions are RNA
gcatutaagccaccga

SEQ ID NO: 2761 - DNA, 16 bp, Artificial sequence
  Synthetic oligonucleotide
  misc_feature (5)..(5): Bases at these positions are RNA
agatuaacattaggtc

SEQ ID NO: 2762 - DNA, 16 bp, Artificial sequence
  Synthetic oligonucleotide
  misc_feature (5)..(5): Bases at these positions are RNA
tacautatatgcctcc

SEQ ID NO: 2763 - DNA, 16 bp, Artificial sequence
  Synthetic oligonucleotide
  misc_feature (5)..(5): Bases at these positions are RNA
ctcaugatcaggtccc

SEQ ID NO: 2764 - DNA, 16 bp, Artificial sequence
  Synthetic oligonucleotide
  misc_feature (5)..(5): Bases at these positions are RNA
tgaautttcaaccagc

SEQ ID NO: 2765 - DNA, 16 bp, Artificial sequence
  Synthetic oligonucleotide
  misc_feature (5)..(5): Bases at these positions are RNA
atgautattagtgggt

SEQ ID NO: 2766 - DNA, 16 bp, Artificial sequence
  Synthetic oligonucleotide
  misc_feature (5)..(5): Bases at these positions are RNA
agcaucaggacacacc

SEQ ID NO: 2767 - DNA, 16 bp, Artificial sequence
  Synthetic oligonucleotide
  misc_feature (5)..(5): Bases at these positions are RNA
agtgugtcctgagcca

SEQ ID NO: 2768 - DNA, 16 bp, Artificial sequence
  Synthetic oligonucleotide
  misc_feature (5)..(5): Bases at these positions are RNA
gtacuccagtaaaccc

SEQ ID NO: 2769 - DNA, 16 bp, Artificial sequence
  Synthetic oligonucleotide
  misc_feature (5)..(5): Bases at these positions are RNA
gctauacctaacacat

SEQ ID NO: 2770 - DNA, 16 bp, Artificial sequence
  Synthetic oligonucleotide
  misc_feature (5)..(5): Bases at these positions are RNA
ctgautaatgccactt

SEQ ID NO: 2771 - DNA, 16 bp, Artificial sequence
  Synthetic oligonucleotide
  misc_feature (5)..(5): Bases at these positions are RNA
tctgugtcacaaggct

SEQ ID NO: 2772 - DNA, 16 bp, Artificial sequence
  Synthetic oligonucleotide
  misc_feature (5)..(5): Bases at these positions are RNA
ttgautagtttccccg

SEQ ID NO: 2773 - DNA, 16 bp, Artificial sequence
  Synthetic oligonucleotide
  misc_feature (5)..(5): Bases at these positions are RNA
agcauaatgtccccga

SEQ ID NO: 2774 - DNA, 16 bp, Artificial sequence
  Synthetic oligonucleotide
  misc_feature (5)..(5): Bases at these positions are RNA
gttauggagaaacccc

SEQ ID NO: 2775 - DNA, 16 bp, Artificial sequence
  Synthetic oligonucleotide
  misc_feature (5)..(5): Bases at these positions are RNA
agtcugtcctcagagg

SEQ ID NO: 2776 - DNA, 16 bp, Artificial sequence
  Synthetic oligonucleotide
  misc_feature (5)..(5): Bases at these positions are RNA
gcttucacttcaatcc

SEQ ID NO: 2777 - DNA, 16 bp, Artificial sequence
  Synthetic oligonucleotide
  misc_feature (5)..(5): Bases at these positions are RNA
cgttugttgaggctca

SEQ ID NO: 2778 - DNA, 16 bp, Artificial sequence
  Synthetic oligonucleotide
  misc_feature (5)..(5): Bases at these positions are RNA
tcagugagagtctgtc

SEQ ID NO: 2779 - DNA, 16 bp, Artificial sequence
  Synthetic oligonucleotide
  misc_feature (5)..(5): Bases at these positions are RNA
caccugaccagagagc

SEQ ID NO: 2780 - DNA, 16 bp, Artificial sequence
  Synthetic oligonucleotide
  misc_feature (5)..(5): Bases at these positions are RNA
gcaguaacatatccat

SEQ ID NO: 2781 - DNA, 16 bp, Artificial sequence
  Synthetic oligonucleotide
  misc_feature (5)..(5): Bases at these positions are RNA
gtgcugagcctcctac

SEQ ID NO: 2782 - DNA, 16 bp, Artificial sequence
  Synthetic oligonucleotide
  misc_feature (5)..(5): Bases at these positions are RNA
ccacutcacgatgcca

SEQ ID NO: 2783 - DNA, 16 bp, Artificial sequence
  Synthetic oligonucleotide
  misc_feature (5)..(5): Bases at these positions are RNA
aaggugctatctagag

SEQ ID NO: 2784 - DNA, 16 bp, Artificial sequence
  Synthetic oligonucleotide
  misc_feature (5)..(5): Bases at these positions are RNA
gtatuacagtttacgg

SEQ ID NO: 2785 - DNA, 16 bp, Artificial sequence
  Synthetic oligonucleotide
  misc_feature (5)..(5): Bases at these positions are RNA
agtautgagacaggca

SEQ ID NO: 2786 - DNA, 16 bp, Artificial sequence
  Synthetic oligonucleotide
  misc_feature (5)..(5): Bases at these positions are RNA
atctugacccatcagc

SEQ ID NO: 2787 - DNA, 16 bp, Artificial sequence
  Synthetic oligonucleotide
  misc_feature (5)..(5): Bases at these positions are RNA
cccauaggctatacct

SEQ ID NO: 2788 - DNA, 16 bp, Artificial sequence
  Synthetic oligonucleotide
  misc_feature (5)..(5): Bases at these positions are RNA
acaauatgaggaccca

SEQ ID NO: 2789 - DNA, 16 bp, Artificial sequence
  Synthetic oligonucleotide
  misc_feature (5)..(5): Bases at these positions are RNA
ctaautacatgaggtc

SEQ ID NO: 2790 - DNA, 16 bp, Artificial sequence
  Synthetic oligonucleotide
  misc_feature (5)..(5): Bases at these positions are RNA
gtctutaaaggagtga

SEQ ID NO: 2791 - DNA, 16 bp, Artificial sequence
  Synthetic oligonucleotide
  misc_feature (5)..(5): Bases at these positions are RNA
gtatugagacaggcag

SEQ ID NO: 2792 - DNA, 16 bp, Artificial sequence
  Synthetic oligonucleotide
  misc_feature (5)..(5): Bases at these positions are RNA
catcutaatgggactc

SEQ ID NO: 2793 - DNA, 16 bp, Artificial sequence
  Synthetic oligonucleotide
  misc_feature (5)..(5): Bases at these positions are RNA
ccttutcgaatttgcc

SEQ ID NO: 2794 - DNA, 16 bp, Artificial sequence
  Synthetic oligonucleotide
  misc_feature (5)..(5): Bases at these positions are RNA
atctuattagcagcag

SEQ ID NO: 2795 - DNA, 16 bp, Artificial sequence
  Synthetic oligonucleotide
tattgagacaggcagt

SEQ ID NO: 2796 - DNA, 16 bp, Artificial sequence
  Synthetic oligonucleotide
aagggaattccgacac

SEQ ID NO: 2797 - DNA, 16 bp, Artificial sequence
  Synthetic oligonucleotide
gtttgtaagtgaagcg

SEQ ID NO: 2798 - DNA, 16 bp, Artificial sequence
  Synthetic oligonucleotide
ctacatagagcatatt

SEQ ID NO: 2799 - DNA, 16 bp, Artificial sequence
  Synthetic oligonucleotide
ttaggtattgacaata

1. An oligomeric compound comprising a modified oligonucleotide consisting of 12 to 50, 12 to 45, 12 to 40, 12 to 35, 12 to 30, 12 to 25, or 12 to 20 linked nucleosides, wherein the nucleobase sequence of the modified oligonucleotide is at least 90% complementary to an equal length portion of a NLRP3 nucleic acid, and wherein the modified oligonucleotide comprises at least one modification selected from a modified sugar moiety and a modified internucleoside linkage.

2. An oligomeric compound comprising a modified oligonucleotide consisting of 12 to 30 linked nucleosides and having a nucleobase sequence comprising at least 8, 9, 10, 11, 12, 13, 14, 15, 16, 17, 18, 19, or 20 contiguous nucleobases complementary to an equal length portion of the nucleobase sequence of any one of SEQ ID NOs: 20-2799.

3. An oligomeric compound comprising a modified oligonucleotide, wherein the nucleobase sequence of the modified oligonucleotide is at least 80% complementary, at least 85% complementary, at least 90% complementary, or at least 95% complementary to an equal length portion within any of nucleobases 12138-12155, 14478-14523, 14578-14622, 14667-14693, 15111-15130, 15182-15200, 17668-17686, 20272-20291, 20634-20657, 23475-23512, or 25026-25049 of SEQ ID NO: 1.

4. The oligomeric compound of claim 3, wherein the modified oligonucleotide comprises at least 8, at least 9, at least 10, at least 11, at least 12, at least 13, at least 14, at least 15, at least 16, at least 17, at least 18, at least 19, or at least 20 contiguous nucleobases within any of nucleobases 12138-12155, 14478-14523, 14578-14622, 14667-14693, 15111-15130, 15182-15200, 17668-17686, 20272-20291, 20634-20657, 23475-23512, or 25026-25049 of SEQ ID NO: 1.

5. An oligomeric compound comprising a modified oligonucleotide consisting of 16 linked nucleosides, wherein the modified oligonucleotide has a nucleobase sequence of SEQ ID NO: 1454.

6. An oligomeric compound comprising a modified oligonucleotide consisting of 16 linked nucleosides, wherein the modified oligonucleotide has a nucleobase sequence of SEQ ID NO: 628.

7. An oligomeric compound comprising a modified oligonucleotide consisting of 16 linked nucleosides, wherein the modified oligonucleotide has a nucleobase sequence of SEQ ID NO: 178.

8. An oligomeric compound comprising a modified oligonucleotide consisting of 16 linked nucleosides, wherein the modified oligonucleotide has a nucleobase sequence of SEQ ID NO: 420.

9. The oligomeric compound of any one of claims 1-8, wherein the modified oligonucleotide has a nucleobase sequence that is at least 80%, 85%, 90%, 95%, or 100% complementary to an equal length portion of a nucleobase sequence selected from SEQ ID NO: 1 or SEQ ID NO: 2 when measured across the entire nucleobase sequence of the modified oligonucleotide.

10. The oligomeric compound of any one of claims 1-9, wherein at least one modified nucleoside comprises a modified sugar moiety.

11. The oligomeric compound of claim 10, wherein the modified sugar moiety comprises a bicyclic sugar moiety.

12. The oligomeric compound of claim 11, wherein the bicyclic sugar moiety comprises a 2′-4′ bridge selected from —O—CH₂—; and —O—CH(CH₃)—.

13. The oligomeric compound of claim 10, wherein the modified sugar moiety comprises a non-bicyclic modified sugar moiety.

14. The oligomeric compound of claim 13, wherein the non-bicyclic modified sugar moiety is a 2′-MOE sugar moiety or 2′-OMe sugar moiety.

15. The oligomeric compound of any one of claims 1-9, wherein at least one modified nucleoside comprises a sugar surrogate.

16. The oligomeric compound of claim 15, wherein the sugar surrogate is selected from morpholino and PNA.

17. The oligomeric compound of any of claims 1-16, wherein the modified oligonucleotide has a sugar motif comprising:
a 5′ wing segment consisting of 1-5 linked nucleosides;
a gap segment consisting of 6-10 linked nucleosides; and
a 3′ wing segment consisting of 1-5 linked nucleosides,
wherein each nucleoside of the 5′ wing segment and each nucleoside of the 3′ wing segment comprises a modified sugar moiety, and wherein each nucleoside of the gap segment comprises an unmodified 2′-deoxyribosyl sugar moiety.

18. The oligomeric compound of any of claims 1-16, wherein the modified oligonucleotide has a sugar motif (5′ to 3′) selected from: kkkddddddddddkkk, kekdddddddddeekk, kkdddddddddkekek, kkkdddddddddkkke, kkkdyddddddddkkk, kekdddddddddeekk, kkdddddddddkekek, wherein each “d” represents a 2′-β-D-deoxyribosyl sugar moiety, each “y” represents a 2′-OMe sugar moiety, each “e” represents a 2′-MOE sugar moiety, and each “k” represents a cEt modified sugar moiety.

19. The oligomeric compound of any one of claims 1-18, wherein the modified oligonucleotide comprises at least one modified internucleoside linkage.

20. The oligomeric compound of claim 19, wherein the modified internucleoside linkage is a phosphorothioate internucleoside linkage or a mesyl phosphoramidate internucleoside linkage.

21. The oligomeric compound of claim 19, wherein each internucleoside linkage of the modified oligonucleotide is a phosphorothioate internucleoside linkage.

22. The oligomeric compound of any one of claims 1-20, wherein the modified oligonucleotide comprises at least one phosphodiester internucleoside linkage.

23. The oligomeric compound of claim 21, wherein each internucleoside linkage is independently selected from a phosphodiester internucleoside linkage, a mesyl phosphoramidate internucleoside linkage, or a phosphorothioate internucleoside linkage.

24. The oligomeric compound of any of claims 1-23, wherein the modified oligonucleotide comprises at least one modified nucleobase.

25. The oligomeric compound of claim 24, wherein the modified nucleobase is a 5-methyl cytosine.

26. The oligomeric compound of any of claims 1-25, wherein the modified oligonucleotide consists of 12-30, 12-22, 12-20, 14-20, 15-25, 16-20, 18-22 or 18-20 linked nucleosides.

27. The oligomeric compound of any of claims 1-26, wherein the modified oligonucleotide consists of 16 linked nucleosides.

28. The oligomeric compound of claim 27, wherein each of nucleosides 1-3 and 14-16 (from 5′ to 3′) is a cEt nucleoside and each of nucleosides 4-13 is a 2′-deoxynucleoside.

29. The oligomeric compound of claim 27, wherein each of nucleosides 1, 3, 15, and 16 (from 5′ to 3′) is a cEt nucleoside, nucleosides 2, 13, and 14 is a 2′-MOE nucleoside, and each of nucleosides 4-12 is a 2′-deoxynucleoside.

30. The oligomeric compound of any of claims 1-29, consisting of the modified oligonucleotide.

31. The oligomeric compound of any of claims 1-29, comprising a conjugate group comprising a conjugate moiety and a conjugate linker.

32. The oligomeric compound of claim 31, wherein the conjugate group comprises 1-3 N-Acetylgalactosamine (GalNAc) groups.

33. The oligomeric compound of claim 31 or 32, wherein the conjugate linker consists of a single bond.

34. The oligomeric compound of claim 33, wherein the conjugate linker is cleavable.

35. The oligomeric compound of claim 34, wherein the conjugate linker comprises 1-3 linker-nucleosides.

36. The oligomeric compound of any of claims 31-35, wherein the conjugate group is attached to the modified oligonucleotide at the 5′-end of the modified oligonucleotide.

37. The oligomeric compound of any of claims 31-36, wherein the conjugate group is attached to the modified oligonucleotide at the 3′-end of the modified oligonucleotide.

38. The oligomeric compound of any of claims 1-37 comprising a terminal group.

39. The oligomeric compound of any of claims 1-38 wherein the oligomeric compound is a single-stranded oligomeric compound.

40. The oligomeric compound of any of claim 1-34 or 36-39, wherein the oligomeric compound does not comprise linker-nucleosides.

41. An oligomeric duplex comprising an oligomeric compound of any of claim 1-38 or 40.

42. An antisense compound comprising or consisting of an oligomeric compound of any of claims 1-40 or an oligomeric duplex of claim 41.

43. The antisense agent of claim 42, wherein the antisense agent is:
i. an RNase H agent capable of reducing the amount of NLRP3 nucleic acid through the activation of RNase H; or
ii. an RNAi agent capable of reducing the amount of NLRP3 nucleic acid through the activation of RISC/Ago2.

44. The antisense agent of any of claim 42 or 43, wherein the conjugate group is a cell-targeting moiety.

45. A modified oligonucleotide according to the following chemical structure: [chemical structure]
or a salt thereof.

46. The modified oligonucleotide of claim 45, which is a sodium salt or a potassium salt.

47. A modified oligonucleotide according to the following chemical structure:

[chemical structure]

48. A modified oligonucleotide according to the following chemical structure: [chemical structure]
or a salt thereof.

49. The modified oligonucleotide of claim 48, which is a sodium salt or a potassium salt.

50. A modified oligonucleotide according to the following chemical structure:

[chemical structure]

51. A modified oligonucleotide according to the following chemical structure: [chemical structure]
or a salt thereof.

52. The modified oligonucleotide of claim 51, which is a sodium salt or a potassium salt.

53. A modified oligonucleotide according to the following chemical structure:

[chemical structure]

54. A modified oligonucleotide according to the following chemical notation:
AₖₛAₖₛ^{m}CₖₛT_{ds}A_{ds}T_{ds}T_{ds}A_{ds}A_{ds}G_{ds}^{m}C_{ds}A_{ds}A_{ds}^{m}CₖₛGₖₛGₖ (SEQ ID NO: 628); wherein
A=an adenine nucleobase,
mC=a 5-methyl cytosine nucleobase,
G=a guanine nucleobase,
T=a thymine nucleobase,
k=a cEt modified sugar moiety,
d=a 2′43-D-deoxyribosyl sugar moiety, and
s=a phosphorothioate internucleoside linkage.

55. A modified oligonucleotide according to the following chemical notation:
TₖₛGₖₛGₖₛA_{ds}A_{ds}T_{ds}A_{ds}T_{ds}A_{ds}T_{ds}^{m}C_{ds}G_{ds}A_{ds}Gₖₛ^{m}CₖₛAₖ (SEQ ID NO: 1454); wherein
A=an adenine nucleobase,
mC=a 5-methyl cytosine nucleobase,
G=a guanine nucleobase,
T=a thymine nucleobase,
k=a cEt modified sugar moiety,
d=a 2′43-D-deoxyribosyl sugar moiety, and
s=a phosphorothioate internucleoside linkage.

56. A modified oligonucleotide according to the following chemical notation:
^{m}Cₖₛ^{m}CₑₛTₖₛTₐₛTₐₛTₐₛ^{m}C_{ds}GₐₛA_{ds}A_{ds}TₐₛTₐₛTₑₛGₑₛ^{m}Cₖₛ^{m}Cₖ (SEQ ID NO: 420); wherein
A=an adenine nucleobase,
mC=a 5-methyl cytosine nucleobase,
G=a guanine nucleobase,
T=a thymine nucleobase,
k=a cEt modified sugar moiety,
e=a 2′-MOE β-D-ribosyl sugar moiety,
d=a 2′43-D-deoxyribosyl sugar moiety, and
s=a phosphorothioate internucleoside linkage.

57. A chirally enriched population of oligomeric compounds of any of claims 1-40, oligomeric duplexes of claim 41, or modified oligonucleotides of claims 45 to 56, wherein the population is enriched for modified oligonucleotides comprising at least one particular phosphorothioate internucleoside linkage having a particular stereochemical configuration.

58. The chirally enriched population of claim 57, wherein the population is enriched for modified oligonucleotides comprising at least one particular phosphorothioate internucleoside linkage having the (Sp) or (Rp) configuration.

59. The chirally enriched population of claim 57, wherein the population is enriched for modified oligonucleotides having a particular, independently selected stereochemical configuration at each phosphorothioate internucleoside linkage.

60. The chirally enriched population of claim 57, wherein the population is enriched for modified oligonucleotides having the (Rp) configuration at one particular phosphorothioate internucleoside linkage and the (Sp) configuration at each of the remaining phosphorothioate internucleoside linkages.

61. The chirally enriched population of claim 57, wherein the population is enriched for modified oligonucleotides having at least 3 contiguous phosphorothioate internucleoside linkages in the Sp, Sp, and Rp configurations, in the 5′ to 3′ direction.

62. A population of oligomeric compounds comprising modified oligonucleotides of any of claims 1-40, oligomeric duplexes of claim 41, or modified oligonucleotides of claims 45 to 56, wherein the stereochemistry of all internucleoside linkages of the modified oligonucleotide are stereorandom.

63. A pharmaceutical composition comprising the oligomeric compound of any of claims 1-40, the oligomeric duplex of claim 41, the antisense compound of any of claims 42-44, the modified oligonucleotides of any one of claims 45-56, or the population of any of claims 57-62; and a pharmaceutically acceptable carrier or diluent.

64. The pharmaceutical composition of claim 63, wherein the pharmaceutically acceptable carrier or diluent comprises sterile water or sterile saline.

65. The pharmaceutical composition of claim 64, consisting of, or consisting essentially of, the oligomeric compound, antisense compound or oligomeric duplex, and sterile water or sterile saline.

66. A method comprising administering to a subject the oligomeric compound of any of claims 1-40, the oligomeric duplex of claim 41, the antisense compound of any of claims 42-44, the modified oligonucleotides of any one of claims 45-56, or the population of any of claims 57-62, or the pharmaceutical composition of any of claims 63-65.

67. A method of treating a kidney disease or kidney injury comprising administering to a subject having or at risk for developing a kidney disease or kidney injury a therapeutically effective amount of the oligomeric compound of any of claims 1-40, the oligomeric duplex of claim 41, the antisense compound of any of claims 42-44, the modified oligonucleotides of any one of claims 45-56, or the population of any of claims 57-62, or the pharmaceutical composition of any of claims 63-65.

68. A method of reducing NLRP3 RNA or NLRP3 protein in a kidney, liver or heart of a subject having or at risk for developing a kidney disease or kidney injury comprising administering a therapeutically effective amount of the oligomeric compound of any of claims 1-40, the oligomeric duplex of claim 41, the antisense compound of any of claims 42-44, the modified oligonucleotides of any one of claims 45-56, or the population of any of claims 57-62, or the pharmaceutical composition of any of claims 63-65.

69. The method of claim 67 or 68, wherein the kidney disease is chronic kidney disease (CKD).

70. The method of claim 67 or 68, wherein the kidney injury is acute kidney injury (AKI).

71. The method of any one of claims 67-70, wherein at least one symptom of the kidney disease or kidney injury is ameliorated.

72. The method of claim 71, wherein the symptom is selected from nausea, vomiting, loss of appetite, reduced urine output, elevated serum creatinine levels, muscle cramping, swelling, itching, chest pain, shortness of breath, and elevated blood pressure.

73. The method of any of claims 67-72, wherein the method prevents or slows progression of the kidney disease or kidney injury.

74. Use of the oligomeric compound of any of claims 1-40, the oligomeric duplex of claim 41, the antisense compound of any of claims 42-44, the modified oligonucleotides of any one of claims 45-56, or the population of any of claims 57-62, or the pharmaceutical composition of any of claims 63-65 for the treatment of a kidney disease or kidney injury.

75. The use of claim 74, wherein the kidney disease is CKD.

76. The use of claim 74, wherein the kidney injury is AKI.

77. A method of treatment comprising administering to a subject having a cardiac disorder or cardiac injury a therapeutically effective amount of the oligomeric compound of any of claims 1-40, the oligomeric duplex of claim 41, the antisense compound of any of claims 42-44, the modified oligonucleotides of any one of claims 45-56, or the population of any of claims 57-62, or the pharmaceutical composition of any of claims 63-65.

78. A method of reducing NLRP3 RNA or NLRP3 protein in a kidney, liver, or heart of a subject having or at risk for developing a cardiac disorder or cardiac injury comprising administering a therapeutically effective amount of the oligomeric compound of any of claims 1-40, the oligomeric duplex of claim 41, the antisense compound of any of claims 42-44, the modified oligonucleotides of any one of claims 45-56, or the population of any of claims 57-62, or the pharmaceutical composition of any of claims 63-65.

79. The method of claim 77 or 78, wherein the cardiac disorder or cardiac injury is heart failure, hyperkalemia, cardiomyopathy, and/or a cardiac arrhythmia.

80. The method of any of claims 77-79, wherein administering the oligomeric compound, the population, the oligomeric duplex, the antisense agent, or the pharmaceutical composition improves a sign or a symptom selected from cardiac function, cardiovascular death, cardiac dilation, cardiac fibrosis, low voltage ECG, diastolic calcium uptake, ejection fraction (EF), left ventricular ejection fraction (LVEF), left ventricular end systolic volume (LVESV), left ventricular end diastolic volume (LVEDV), mitral valve flow profile, left ventricle (LV) strain, left ventricle (LV) strain rate, infarct size, heart failure hospitalization, 6 minute walk test (6MWT), the Kansas City Cardiomyopathy Questionnaire Score (KCCQS), heart rate, and heart rhythm in the subject.

81. Use of the oligomeric compound of any of claims 1-40, the oligomeric duplex of claim 41, the antisense compound of any of claims 42-44, the modified oligonucleotides of any one of claims 45-56, or the population of any of claims 57-62, or the pharmaceutical composition of any of claims 63-65 for the treatment of a cardiac disorder or cardiac injury.

82. The use of claim 81, wherein the cardiac disorder or cardiac injury is heart failure, hyperkalemia, cardiomyopathy and/or a cardiac arrhythmia.

83. A method of treatment comprising administering to a subject having a liver disorder a therapeutically effective amount of the oligomeric compound of any of claims 1-40, the oligomeric duplex of claim 41, the antisense compound of any of claims 42-44, the modified oligonucleotides of any one of claims 45-56, or the population of any of claims 57-62, or the pharmaceutical composition of any of claims 63-65.

84. The method of claim 83, wherein the liver disorder is non-alcoholic fatty liver disease (NAFLD) or non-alcoholic steatohepatitis (NASH).

85. Use of the oligomeric compound of any of claims 1-40, the oligomeric duplex of claim 41, the antisense compound of any of claims 42-44, the modified oligonucleotides of any one of claims 45-56, or the population of any of claims 57-62, or the pharmaceutical composition of any of claims 63-65 in the manufacture of a medicament for treating a disease associated with NLRP3.
